United States Patent Application Publication US 2024/0000970 A1 - sequence listing, part 4

SEQ ID NO: 92335 - RNA, 20 nt, Artificial Sequence
  LRRK2 RNA guide
ugucuuagauucaucugaca

SEQ ID NO: 92336 - RNA, 20 nt, Artificial Sequence
  LRRK2 RNA guide
uuagauucaucugacaguuu

SEQ ID NO: 92337 - RNA, 20 nt, Artificial Sequence
  LRRK2 RNA guide
uucaucugacaguuuuucua

SEQ ID NO: 92338 - RNA, 20 nt, Artificial Sequence
  LRRK2 RNA guide
uuccugucuuagauucaucu

SEQ ID NO: 92339 - RNA, 20 nt, Artificial Sequence
  LRRK2 RNA guide
uuuccugucuuagauucauc

SEQ ID NO: 92340 - RNA, 21 nt, Artificial Sequence
  LRRK2 RNA guide
aaacugucagaugaaucuaag

SEQ ID NO: 92341 - RNA, 21 nt, Artificial Sequence
  LRRK2 RNA guide
aaaguuuccugucuuagauuc

SEQ ID NO: 92342 - RNA, 21 nt, Artificial Sequence
  LRRK2 RNA guide
aacugucagaugaaucuaaga

SEQ ID NO: 92343 - RNA, 21 nt, Artificial Sequence
  LRRK2 RNA guide
aaguuuccugucuuagauuca

SEQ ID NO: 92344 - RNA, 21 nt, Artificial Sequence
  LRRK2 RNA guide
aauccauagaaaaacugucag

SEQ ID NO: 92345 - RNA, 21 nt, Artificial Sequence
  LRRK2 RNA guide
acaauccauagaaaaacuguc

SEQ ID NO: 92346 - RNA, 21 nt, Artificial Sequence
  LRRK2 RNA guide
acugucagaugaaucuaagac

SEQ ID NO: 92347 - RNA, 21 nt, Artificial Sequence
  LRRK2 RNA guide
agaaaaacugucagaugaauc

SEQ ID NO: 92348 - RNA, 21 nt, Artificial Sequence
  LRRK2 RNA guide
agaugaaucuaagacaggaaa

SEQ ID NO: 92349 - RNA, 21 nt, Artificial Sequence
  LRRK2 RNA guide
agauucaucugacaguuuuuc

SEQ ID NO: 92350 - RNA, 21 nt, Artificial Sequence
  LRRK2 RNA guide
aguuuccugucuuagauucau

SEQ ID NO: 92351 - RNA, 21 nt, Artificial Sequence
  LRRK2 RNA guide
auccauagaaaaacugucaga

SEQ ID NO: 92352 - RNA, 21 nt, Artificial Sequence
  LRRK2 RNA guide
aucugacaguuuuucuaugga

SEQ ID NO: 92353 - RNA, 21 nt, Artificial Sequence
  LRRK2 RNA guide
caaaguuuccugucuuagauu

SEQ ID NO: 92354 - RNA, 21 nt, Artificial Sequence
  LRRK2 RNA guide
caauccauagaaaaacuguca

SEQ ID NO: 92355 - RNA, 21 nt, Artificial Sequence
  LRRK2 RNA guide
cacaauccauagaaaaacugu

SEQ ID NO: 92356 - RNA, 21 nt, Artificial Sequence
  LRRK2 RNA guide
cagaugaaucuaagacaggaa

SEQ ID NO: 92357 - RNA, 21 nt, Artificial Sequence
  LRRK2 RNA guide
cauagaaaaacugucagauga

SEQ ID NO: 92358 - RNA, 21 nt, Artificial Sequence
  LRRK2 RNA guide
caucugacaguuuuucuaugg

SEQ ID NO: 92359 - RNA, 21 nt, Artificial Sequence
  LRRK2 RNA guide
ccauagaaaaacugucagaug

SEQ ID NO: 92360 - RNA, 21 nt, Artificial Sequence
  LRRK2 RNA guide
ccugucuuagauucaucugac

SEQ ID NO: 92361 - RNA, 21 nt, Artificial Sequence
  LRRK2 RNA guide
cugucagaugaaucuaagaca

SEQ ID NO: 92362 - RNA, 21 nt, Artificial Sequence
  LRRK2 RNA guide
cugucuuagauucaucugaca

SEQ ID NO: 92363 - RNA, 21 nt, Artificial Sequence
  LRRK2 RNA guide
cuuagauucaucugacaguuu

SEQ ID NO: 92364 - RNA, 21 nt, Artificial Sequence
  LRRK2 RNA guide
gaaaaacugucagaugaaucu

SEQ ID NO: 92365 - RNA, 21 nt, Artificial Sequence
  LRRK2 RNA guide
gaugaaucuaagacaggaaac

SEQ ID NO: 92366 - RNA, 21 nt, Artificial Sequence
  LRRK2 RNA guide
gauucaucugacaguuuuucu

SEQ ID NO: 92367 - RNA, 21 nt, Artificial Sequence
  LRRK2 RNA guide
gucagaugaaucuaagacagg

SEQ ID NO: 92368 - RNA, 21 nt, Artificial Sequence
  LRRK2 RNA guide
gucuuagauucaucugacagu

SEQ ID NO: 92369 - RNA, 21 nt, Artificial Sequence
  LRRK2 RNA guide
guuuccugucuuagauucauc

SEQ ID NO: 92370 - RNA, 21 nt, Artificial Sequence
  LRRK2 RNA guide
ucaaaguuuccugucuuagau

SEQ ID NO: 92371 - RNA, 21 nt, Artificial Sequence
  LRRK2 RNA guide
ucacaauccauagaaaaacug

SEQ ID NO: 92372 - RNA, 21 nt, Artificial Sequence
  LRRK2 RNA guide
ucagaugaaucuaagacagga

SEQ ID NO: 92373 - RNA, 21 nt, Artificial Sequence
  LRRK2 RNA guide
ucaucugacaguuuuucuaug

SEQ ID NO: 92374 - RNA, 21 nt, Artificial Sequence
  LRRK2 RNA guide
uccauagaaaaacugucagau

SEQ ID NO: 92375 - RNA, 21 nt, Artificial Sequence
  LRRK2 RNA guide
uccugucuuagauucaucuga

SEQ ID NO: 92376 - RNA, 21 nt, Artificial Sequence
  LRRK2 RNA guide
ucuuagauucaucugacaguu

SEQ ID NO: 92377 - RNA, 21 nt, Artificial Sequence
  LRRK2 RNA guide
ugucagaugaaucuaagacag

SEQ ID NO: 92378 - RNA, 21 nt, Artificial Sequence
  LRRK2 RNA guide
ugucuuagauucaucugacag

SEQ ID NO: 92379 - RNA, 21 nt, Artificial Sequence
  LRRK2 RNA guide
uucaaaguuuccugucuuaga

SEQ ID NO: 92380 - RNA, 21 nt, Artificial Sequence
  LRRK2 RNA guide
uuccugucuuagauucaucug

SEQ ID NO: 92381 - RNA, 21 nt, Artificial Sequence
  LRRK2 RNA guide
uuuccugucuuagauucaucu

SEQ ID NO: 92382 - RNA, 22 nt, Artificial Sequence
  LRRK2 RNA guide
aaaacugucagaugaaucuaag

SEQ ID NO: 92383 - RNA, 22 nt, Artificial Sequence
  LRRK2 RNA guide
aaacugucagaugaaucuaaga

SEQ ID NO: 92384 - RNA, 22 nt, Artificial Sequence
  LRRK2 RNA guide
aaaguuuccugucuuagauuca

SEQ ID NO: 92385 - RNA, 22 nt, Artificial Sequence
  LRRK2 RNA guide
aacugucagaugaaucuaagac

SEQ ID NO: 92386 - RNA, 22 nt, Artificial Sequence
  LRRK2 RNA guide
aaguuuccugucuuagauucau

SEQ ID NO: 92387 - RNA, 22 nt, Artificial Sequence
  LRRK2 RNA guide
aauccauagaaaaacugucaga

SEQ ID NO: 92388 - RNA, 22 nt, Artificial Sequence
  LRRK2 RNA guide
acaauccauagaaaaacuguca

SEQ ID NO: 92389 - RNA, 22 nt, Artificial Sequence
  LRRK2 RNA guide
acugucagaugaaucuaagaca

SEQ ID NO: 92390 - RNA, 22 nt, Artificial Sequence
  LRRK2 RNA guide
agaaaaacugucagaugaaucu

SEQ ID NO: 92391 - RNA, 22 nt, Artificial Sequence
  LRRK2 RNA guide
agaugaaucuaagacaggaaac

SEQ ID NO: 92392 - RNA, 22 nt, Artificial Sequence
  LRRK2 RNA guide
agauucaucugacaguuuuucu

SEQ ID NO: 92393 - RNA, 22 nt, Artificial Sequence
  LRRK2 RNA guide
aguuuccugucuuagauucauc

SEQ ID NO: 92394 - RNA, 22 nt, Artificial Sequence
  LRRK2 RNA guide
auccauagaaaaacugucagau

SEQ ID NO: 92395 - RNA, 22 nt, Artificial Sequence
  LRRK2 RNA guide
aucugacaguuuuucuauggau

SEQ ID NO: 92396 - RNA, 22 nt, Artificial Sequence
  LRRK2 RNA guide
caaaguuuccugucuuagauuc

SEQ ID NO: 92397 - RNA, 22 nt, Artificial Sequence
  LRRK2 RNA guide
caauccauagaaaaacugucag

SEQ ID NO: 92398 - RNA, 22 nt, Artificial Sequence
  LRRK2 RNA guide
cacaauccauagaaaaacuguc

SEQ ID NO: 92399 - RNA, 22 nt, Artificial Sequence
  LRRK2 RNA guide
cagaugaaucuaagacaggaaa

SEQ ID NO: 92400 - RNA, 22 nt, Artificial Sequence
  LRRK2 RNA guide
cauagaaaaacugucagaugaa

SEQ ID NO: 92401 - RNA, 22 nt, Artificial Sequence
  LRRK2 RNA guide
caucugacaguuuuucuaugga

SEQ ID NO: 92402 - RNA, 22 nt, Artificial Sequence
  LRRK2 RNA guide
ccauagaaaaacugucagauga

SEQ ID NO: 92403 - RNA, 22 nt, Artificial Sequence
  LRRK2 RNA guide
ccugucuuagauucaucugaca

SEQ ID NO: 92404 - RNA, 22 nt, Artificial Sequence
  LRRK2 RNA guide
cucacaauccauagaaaaacug

SEQ ID NO: 92405 - RNA, 22 nt, Artificial Sequence
  LRRK2 RNA guide
cugucagaugaaucuaagacag

SEQ ID NO: 92406 - RNA, 22 nt, Artificial Sequence
  LRRK2 RNA guide
cugucuuagauucaucugacag

SEQ ID NO: 92407 - RNA, 22 nt, Artificial Sequence
  LRRK2 RNA guide
cuuagauucaucugacaguuuu

SEQ ID NO: 92408 - RNA, 22 nt, Artificial Sequence
  LRRK2 RNA guide
cuucaaaguuuccugucuuaga

SEQ ID NO: 92409 - RNA, 22 nt, Artificial Sequence
  LRRK2 RNA guide
gaaaaacugucagaugaaucua

SEQ ID NO: 92410 - RNA, 22 nt, Artificial Sequence
  LRRK2 RNA guide
gaugaaucuaagacaggaaacu

SEQ ID NO: 92411 - RNA, 22 nt, Artificial Sequence
  LRRK2 RNA guide
gauucaucugacaguuuuucua

SEQ ID NO: 92412 - RNA, 22 nt, Artificial Sequence
  LRRK2 RNA guide
gucagaugaaucuaagacagga

SEQ ID NO: 92413 - RNA, 22 nt, Artificial Sequence
  LRRK2 RNA guide
gucuuagauucaucugacaguu

SEQ ID NO: 92414 - RNA, 22 nt, Artificial Sequence
  LRRK2 RNA guide
guuuccugucuuagauucaucu

SEQ ID NO: 92415 - RNA, 22 nt, Artificial Sequence
  LRRK2 RNA guide
uagaaaaacugucagaugaauc

SEQ ID NO: 92416 - RNA, 22 nt, Artificial Sequence
  LRRK2 RNA guide
uagauucaucugacaguuuuuc

SEQ ID NO: 92417 - RNA, 22 nt, Artificial Sequence
  LRRK2 RNA guide
ucaaaguuuccugucuuagauu

SEQ ID NO: 92418 - RNA, 22 nt, Artificial Sequence
  LRRK2 RNA guide
ucacaauccauagaaaaacugu

SEQ ID NO: 92419 - RNA, 22 nt, Artificial Sequence
  LRRK2 RNA guide
ucagaugaaucuaagacaggaa

SEQ ID NO: 92420 - RNA, 22 nt, Artificial Sequence
  LRRK2 RNA guide
ucaucugacaguuuuucuaugg

SEQ ID NO: 92421 - RNA, 22 nt, Artificial Sequence
  LRRK2 RNA guide
uccauagaaaaacugucagaug

SEQ ID NO: 92422 - RNA, 22 nt, Artificial Sequence
  LRRK2 RNA guide
uccugucuuagauucaucugac

SEQ ID NO: 92423 - RNA, 22 nt, Artificial Sequence
  LRRK2 RNA guide
ucuuagauucaucugacaguuu

SEQ ID NO: 92424 - RNA, 22 nt, Artificial Sequence
  LRRK2 RNA guide
ugucagaugaaucuaagacagg

SEQ ID NO: 92425 - RNA, 22 nt, Artificial Sequence
  LRRK2 RNA guide
ugucuuagauucaucugacagu

SEQ ID NO: 92426 - RNA, 22 nt, Artificial Sequence
  LRRK2 RNA guide
uucaaaguuuccugucuuagau

SEQ ID NO: 92427 - RNA, 22 nt, Artificial Sequence
  LRRK2 RNA guide
uucaucugacaguuuuucuaug

SEQ ID NO: 92428 - RNA, 22 nt, Artificial Sequence
  LRRK2 RNA guide
uuccugucuuagauucaucuga

SEQ ID NO: 92429 - RNA, 22 nt, Artificial Sequence
  LRRK2 RNA guide
uuuccugucuuagauucaucug

SEQ ID NO: 92430 - RNA, 20 nt, Artificial Sequence
  LRRK2 RNA guide
aaaaacugucagcugaaucu

SEQ ID NO: 92431 - RNA, 20 nt, Artificial Sequence
  LRRK2 RNA guide
aaaacugucagcugaaucua

SEQ ID NO: 92432 - RNA, 20 nt, Artificial Sequence
  LRRK2 RNA guide
aaacugucagcugaaucuaa

SEQ ID NO: 92433 - RNA, 20 nt, Artificial Sequence
  LRRK2 RNA guide
aacugucagcugaaucuaag

SEQ ID NO: 92434 - RNA, 20 nt, Artificial Sequence
  LRRK2 RNA guide
acugucagcugaaucuaaga

SEQ ID NO: 92435 - RNA, 20 nt, Artificial Sequence
  LRRK2 RNA guide
agaaaaacugucagcugaau

SEQ ID NO: 92436 - RNA, 20 nt, Artificial Sequence
  LRRK2 RNA guide
agauucagcugacaguuuuu

SEQ ID NO: 92437 - RNA, 20 nt, Artificial Sequence
  LRRK2 RNA guide
agcugaaucuaagacaggaa

SEQ ID NO: 92438 - RNA, 20 nt, Artificial Sequence
  LRRK2 RNA guide
agcugacaguuuuucuaugg

SEQ ID NO: 92439 - RNA, 20 nt, Artificial Sequence
  LRRK2 RNA guide
auagaaaaacugucagcuga

SEQ ID NO: 92440 - RNA, 20 nt, Artificial Sequence
  LRRK2 RNA guide
auucagcugacaguuuuucu

SEQ ID NO: 92441 - RNA, 20 nt, Artificial Sequence
  LRRK2 RNA guide
cagcugaaucuaagacagga

SEQ ID NO: 92442 - RNA, 20 nt, Artificial Sequence
  LRRK2 RNA guide
cagcugacaguuuuucuaug

SEQ ID NO: 92443 - RNA, 20 nt, Artificial Sequence
  LRRK2 RNA guide
cauagaaaaacugucagcug

SEQ ID NO: 92444 - RNA, 20 nt, Artificial Sequence
  LRRK2 RNA guide
ccauagaaaaacugucagcu

SEQ ID NO: 92445 - RNA, 20 nt, Artificial Sequence
  LRRK2 RNA guide
ccugucuuagauucagcuga

SEQ ID NO: 92446 - RNA, 20 nt, Artificial Sequence
  LRRK2 RNA guide
cugucagcugaaucuaagac

SEQ ID NO: 92447 - RNA, 20 nt, Artificial Sequence
  LRRK2 RNA guide
cugucuuagauucagcugac

SEQ ID NO: 92448 - RNA, 20 nt, Artificial Sequence
  LRRK2 RNA guide
cuuagauucagcugacaguu

SEQ ID NO: 92449 - RNA, 20 nt, Artificial Sequence
  LRRK2 RNA guide
gaaaaacugucagcugaauc

SEQ ID NO: 92450 - RNA, 20 nt, Artificial Sequence
  LRRK2 RNA guide
gauucagcugacaguuuuuc

SEQ ID NO: 92451 - RNA, 20 nt, Artificial Sequence
  LRRK2 RNA guide
gcugaaucuaagacaggaaa

SEQ ID NO: 92452 - RNA, 20 nt, Artificial Sequence
  LRRK2 RNA guide
gucagcugaaucuaagacag

SEQ ID NO: 92453 - RNA, 20 nt, Artificial Sequence
  LRRK2 RNA guide
gucuuagauucagcugacag

SEQ ID NO: 92454 - RNA, 20 nt, Artificial Sequence
  LRRK2 RNA guide
guuuccugucuuagauucag

SEQ ID NO: 92455 - RNA, 20 nt, Artificial Sequence
  LRRK2 RNA guide
uagaaaaacugucagcugaa

SEQ ID NO: 92456 - RNA, 20 nt, Artificial Sequence
  LRRK2 RNA guide
uagauucagcugacaguuuu

SEQ ID NO: 92457 - RNA, 20 nt, Artificial Sequence
  LRRK2 RNA guide
ucagcugaaucuaagacagg

SEQ ID NO: 92458 - RNA, 20 nt, Artificial Sequence
  LRRK2 RNA guide
ucagcugacaguuuuucuau

SEQ ID NO: 92459 - RNA, 20 nt, Artificial Sequence
  LRRK2 RNA guide
uccauagaaaaacugucagc

SEQ ID NO: 92460 - RNA, 20 nt, Artificial Sequence
  LRRK2 RNA guide
uccugucuuagauucagcug

SEQ ID NO: 92461 - RNA, 20 nt, Artificial Sequence
  LRRK2 RNA guide
ucuuagauucagcugacagu

SEQ ID NO: 92462 - RNA, 20 nt, Artificial Sequence
  LRRK2 RNA guide
ugucagcugaaucuaagaca

SEQ ID NO: 92463 - RNA, 20 nt, Artificial Sequence
  LRRK2 RNA guide
ugucuuagauucagcugaca

SEQ ID NO: 92464 - RNA, 20 nt, Artificial Sequence
  LRRK2 RNA guide
uuagauucagcugacaguuu

SEQ ID NO: 92465 - RNA, 20 nt, Artificial Sequence
  LRRK2 RNA guide
uucagcugacaguuuuucua

SEQ ID NO: 92466 - RNA, 20 nt, Artificial Sequence
  LRRK2 RNA guide
uuccugucuuagauucagcu

SEQ ID NO: 92467 - RNA, 20 nt, Artificial Sequence
  LRRK2 RNA guide
uuuccugucuuagauucagc

SEQ ID NO: 92468 - RNA, 21 nt, Artificial Sequence
  LRRK2 RNA guide
aaaaacugucagcugaaucua

SEQ ID NO: 92469 - RNA, 21 nt, Artificial Sequence
  LRRK2 RNA guide
aaaacugucagcugaaucuaa

SEQ ID NO: 92470 - RNA, 21 nt, Artificial Sequence
  LRRK2 RNA guide
aaacugucagcugaaucuaag

SEQ ID NO: 92471 - RNA, 21 nt, Artificial Sequence
  LRRK2 RNA guide
aacugucagcugaaucuaaga

SEQ ID NO: 92472 - RNA, 21 nt, Artificial Sequence
  LRRK2 RNA guide
acugucagcugaaucuaagac

SEQ ID NO: 92473 - RNA, 21 nt, Artificial Sequence
  LRRK2 RNA guide
agaaaaacugucagcugaauc

SEQ ID NO: 92474 - RNA, 21 nt, Artificial Sequence
  LRRK2 RNA guide
agauucagcugacaguuuuuc

SEQ ID NO: 92475 - RNA, 21 nt, Artificial Sequence
  LRRK2 RNA guide
agcugaaucuaagacaggaaa

SEQ ID NO: 92476 - RNA, 21 nt, Artificial Sequence
  LRRK2 RNA guide
agcugacaguuuuucuaugga

SEQ ID NO: 92477 - RNA, 21 nt, Artificial Sequence
  LRRK2 RNA guide
aguuuccugucuuagauucag

SEQ ID NO: 92478 - RNA, 21 nt, Artificial Sequence
  LRRK2 RNA guide
auagaaaaacugucagcugaa

SEQ ID NO: 92479 - RNA, 21 nt, Artificial Sequence
  LRRK2 RNA guide
auccauagaaaaacugucagc

SEQ ID NO: 92480 - RNA, 21 nt, Artificial Sequence
  LRRK2 RNA guide
auucagcugacaguuuuucua

SEQ ID NO: 92481 - RNA, 21 nt, Artificial Sequence
  LRRK2 RNA guide
cagcugaaucuaagacaggaa

SEQ ID NO: 92482 - RNA, 21 nt, Artificial Sequence
  LRRK2 RNA guide
cagcugacaguuuuucuaugg

SEQ ID NO: 92483 - RNA, 21 nt, Artificial Sequence
  LRRK2 RNA guide
cauagaaaaacugucagcuga

SEQ ID NO: 92484 - RNA, 21 nt, Artificial Sequence
  LRRK2 RNA guide
ccauagaaaaacugucagcug

SEQ ID NO: 92485 - RNA, 21 nt, Artificial Sequence
  LRRK2 RNA guide
ccugucuuagauucagcugac

SEQ ID NO: 92486 - RNA, 21 nt, Artificial Sequence
  LRRK2 RNA guide
cugucagcugaaucuaagaca

SEQ ID NO: 92487 - RNA, 21 nt, Artificial Sequence
  LRRK2 RNA guide
cugucuuagauucagcugaca

SEQ ID NO: 92488 - RNA, 21 nt, Artificial Sequence
  LRRK2 RNA guide
cuuagauucagcugacaguuu

SEQ ID NO: 92489 - RNA, 21 nt, Artificial Sequence
  LRRK2 RNA guide
gaaaaacugucagcugaaucu

SEQ ID NO: 92490 - RNA, 21 nt, Artificial Sequence
  LRRK2 RNA guide
gauucagcugacaguuuuucu

SEQ ID NO: 92491 - RNA, 21 nt, Artificial Sequence
  LRRK2 RNA guide
gcugaaucuaagacaggaaac

SEQ ID NO: 92492 - RNA, 21 nt, Artificial Sequence
  LRRK2 RNA guide
gucagcugaaucuaagacagg

SEQ ID NO: 92493 - RNA, 21 nt, Artificial Sequence
  LRRK2 RNA guide
gucuuagauucagcugacagu

SEQ ID NO: 92494 - RNA, 21 nt, Artificial Sequence
  LRRK2 RNA guide
guuuccugucuuagauucagc

SEQ ID NO: 92495 - RNA, 21 nt, Artificial Sequence
  LRRK2 RNA guide
uagaaaaacugucagcugaau

SEQ ID NO: 92496 - RNA, 21 nt, Artificial Sequence
  LRRK2 RNA guide
uagauucagcugacaguuuuu

SEQ ID NO: 92497 - RNA, 21 nt, Artificial Sequence
  LRRK2 RNA guide
ucagcugaaucuaagacagga

SEQ ID NO: 92498 - RNA, 21 nt, Artificial Sequence
  LRRK2 RNA guide
ucagcugacaguuuuucuaug

SEQ ID NO: 92499 - RNA, 21 nt, Artificial Sequence
  LRRK2 RNA guide
uccauagaaaaacugucagcu

SEQ ID NO: 92500 - RNA, 21 nt, Artificial Sequence
  LRRK2 RNA guide
uccugucuuagauucagcuga

SEQ ID NO: 92501 - RNA, 21 nt, Artificial Sequence
  LRRK2 RNA guide
ucuuagauucagcugacaguu

SEQ ID NO: 92502 - RNA, 21 nt, Artificial Sequence
  LRRK2 RNA guide
ugucagcugaaucuaagacag

SEQ ID NO: 92503 - RNA, 21 nt, Artificial Sequence
  LRRK2 RNA guide
ugucuuagauucagcugacag

SEQ ID NO: 92504 - RNA, 21 nt, Artificial Sequence
  LRRK2 RNA guide
uuagauucagcugacaguuuu

SEQ ID NO: 92505 - RNA, 21 nt, Artificial Sequence
  LRRK2 RNA guide
uucagcugacaguuuuucuau

SEQ ID NO: 92506 - RNA, 21 nt, Artificial Sequence
  LRRK2 RNA guide
uuccugucuuagauucagcug

SEQ ID NO: 92507 - RNA, 21 nt, Artificial Sequence
  LRRK2 RNA guide
uuuccugucuuagauucagcu

SEQ ID NO: 92508 - RNA, 22 nt, Artificial Sequence
  LRRK2 RNA guide
aaaaacugucagcugaaucuaa

SEQ ID NO: 92509 - RNA, 22 nt, Artificial Sequence
  LRRK2 RNA guide
aaaacugucagcugaaucuaag

SEQ ID NO: 92510 - RNA, 22 nt, Artificial Sequence
  LRRK2 RNA guide
aaacugucagcugaaucuaaga

SEQ ID NO: 92511 - RNA, 22 nt, Artificial Sequence
  LRRK2 RNA guide
aacugucagcugaaucuaagac

SEQ ID NO: 92512 - RNA, 22 nt, Artificial Sequence
  LRRK2 RNA guide
aaguuuccugucuuagauucag

SEQ ID NO: 92513 - RNA, 22 nt, Artificial Sequence
  LRRK2 RNA guide
aauccauagaaaaacugucagc

SEQ ID NO: 92514 - RNA, 22 nt, Artificial Sequence
  LRRK2 RNA guide
acugucagcugaaucuaagaca

SEQ ID NO: 92515 - RNA, 22 nt, Artificial Sequence
  LRRK2 RNA guide
agaaaaacugucagcugaaucu

SEQ ID NO: 92516 - RNA, 22 nt, Artificial Sequence
  LRRK2 RNA guide
agauucagcugacaguuuuucu

SEQ ID NO: 92517 - RNA, 22 nt, Artificial Sequence
  LRRK2 RNA guide
agcugaaucuaagacaggaaac

SEQ ID NO: 92518 - RNA, 22 nt, Artificial Sequence
  LRRK2 RNA guide
agcugacaguuuuucuauggau

SEQ ID NO: 92519 - RNA, 22 nt, Artificial Sequence
  LRRK2 RNA guide
aguuuccugucuuagauucagc

SEQ ID NO: 92520 - RNA, 22 nt, Artificial Sequence
  LRRK2 RNA guide
auagaaaaacugucagcugaau

SEQ ID NO: 92521 - RNA, 22 nt, Artificial Sequence
  LRRK2 RNA guide
auccauagaaaaacugucagcu

SEQ ID NO: 92522 - RNA, 22 nt, Artificial Sequence
  LRRK2 RNA guide
auucagcugacaguuuuucuau

SEQ ID NO: 92523 - RNA, 22 nt, Artificial Sequence
  LRRK2 RNA guide
cagcugaaucuaagacaggaaa

SEQ ID NO: 92524 - RNA, 22 nt, Artificial Sequence
  LRRK2 RNA guide
cagcugacaguuuuucuaugga

SEQ ID NO: 92525 - RNA, 22 nt, Artificial Sequence
  LRRK2 RNA guide
cauagaaaaacugucagcugaa

SEQ ID NO: 92526 - RNA, 22 nt, Artificial Sequence
  LRRK2 RNA guide
ccauagaaaaacugucagcuga

SEQ ID NO: 92527 - RNA, 22 nt, Artificial Sequence
  LRRK2 RNA guide
ccugucuuagauucagcugaca

SEQ ID NO: 92528 - RNA, 22 nt, Artificial Sequence
  LRRK2 RNA guide
cugucagcugaaucuaagacag

SEQ ID NO: 92529 - RNA, 22 nt, Artificial Sequence
  LRRK2 RNA guide
cugucuuagauucagcugacag

SEQ ID NO: 92530 - RNA, 22 nt, Artificial Sequence
  LRRK2 RNA guide
cuuagauucagcugacaguuuu

SEQ ID NO: 92531 - RNA, 22 nt, Artificial Sequence
  LRRK2 RNA guide
gaaaaacugucagcugaaucua

SEQ ID NO: 92532 - RNA, 22 nt, Artificial Sequence
  LRRK2 RNA guide
gauucagcugacaguuuuucua

SEQ ID NO: 92533 - RNA, 22 nt, Artificial Sequence
  LRRK2 RNA guide
gcugaaucuaagacaggaaacu

SEQ ID NO: 92534 - RNA, 22 nt, Artificial Sequence
  LRRK2 RNA guide
gucagcugaaucuaagacagga

SEQ ID NO: 92535 - RNA, 22 nt, Artificial Sequence
  LRRK2 RNA guide
gucuuagauucagcugacaguu

SEQ ID NO: 92536 - RNA, 22 nt, Artificial Sequence
  LRRK2 RNA guide
guuuccugucuuagauucagcu

SEQ ID NO: 92537 - RNA, 22 nt, Artificial Sequence
  LRRK2 RNA guide
uagaaaaacugucagcugaauc

SEQ ID NO: 92538 - RNA, 22 nt, Artificial Sequence
  LRRK2 RNA guide
uagauucagcugacaguuuuuc

SEQ ID NO: 92539 - RNA, 22 nt, Artificial Sequence
  LRRK2 RNA guide
ucagcugaaucuaagacaggaa

SEQ ID NO: 92540 - RNA, 22 nt, Artificial Sequence
  LRRK2 RNA guide
ucagcugacaguuuuucuaugg

SEQ ID NO: 92541 - RNA, 22 nt, Artificial Sequence
  LRRK2 RNA guide
uccauagaaaaacugucagcug

SEQ ID NO: 92542 - RNA, 22 nt, Artificial Sequence
  LRRK2 RNA guide
uccugucuuagauucagcugac

SEQ ID NO: 92543 - RNA, 22 nt, Artificial Sequence
  LRRK2 RNA guide
ucuuagauucagcugacaguuu

SEQ ID NO: 92544 - RNA, 22 nt, Artificial Sequence
  LRRK2 RNA guide
ugucagcugaaucuaagacagg

SEQ ID NO: 92545 - RNA, 22 nt, Artificial Sequence
  LRRK2 RNA guide
ugucuuagauucagcugacagu

SEQ ID NO: 92546 - RNA, 22 nt, Artificial Sequence
  LRRK2 RNA guide
uuagauucagcugacaguuuuu

SEQ ID NO: 92547 - RNA, 22 nt, Artificial Sequence
  LRRK2 RNA guide
uucagcugacaguuuuucuaug

SEQ ID NO: 92548 - RNA, 22 nt, Artificial Sequence
  LRRK2 RNA guide
uuccugucuuagauucagcuga

SEQ ID NO: 92549 - RNA, 22 nt, Artificial Sequence
  LRRK2 RNA guide
uuuccugucuuagauucagcug

SEQ ID NO: 92550 - RNA, 20 nt, Artificial Sequence
  LRRK2 RNA guide
aaggagaccuguuggcccuu

SEQ ID NO: 92551 - RNA, 20 nt, Artificial Sequence
  LRRK2 RNA guide
aagggcucacaguuuauguu

SEQ ID NO: 92552 - RNA, 20 nt, Artificial Sequence
  LRRK2 RNA guide
acaguuuauguucagaaggg

SEQ ID NO: 92553 - RNA, 20 nt, Artificial Sequence
  LRRK2 RNA guide
accuguuggcccuucugaac

SEQ ID NO: 92554 - RNA, 20 nt, Artificial Sequence
  LRRK2 RNA guide
agaagggcucacaguuuaug

SEQ ID NO: 92555 - RNA, 20 nt, Artificial Sequence
  LRRK2 RNA guide
agaccuguuggcccuucuga

SEQ ID NO: 92556 - RNA, 20 nt, Artificial Sequence
  LRRK2 RNA guide
aggagaccuguuggcccuuc

SEQ ID NO: 92557 - RNA, 20 nt, Artificial Sequence
  LRRK2 RNA guide
agggcucacaguuuauguuc

SEQ ID NO: 92558 - RNA, 20 nt, Artificial Sequence
  LRRK2 RNA guide
aguuuauguucagaagggcc

SEQ ID NO: 92559 - RNA, 20 nt, Artificial Sequence
  LRRK2 RNA guide
auguucagaagggccaacag

SEQ ID NO: 92560 - RNA, 20 nt, Artificial Sequence
  LRRK2 RNA guide
caaggagaccuguuggcccu

SEQ ID NO: 92561 - RNA, 20 nt, Artificial Sequence
  LRRK2 RNA guide
cacaguuuauguucagaagg

SEQ ID NO: 92562 - RNA, 20 nt, Artificial Sequence
  LRRK2 RNA guide
caguuuauguucagaagggc

SEQ ID NO: 92563 - RNA, 20 nt, Artificial Sequence
  LRRK2 RNA guide
cccuucugaacauaaacugu

SEQ ID NO: 92564 - RNA, 20 nt, Artificial Sequence
  LRRK2 RNA guide
ccuguuggcccuucugaaca

SEQ ID NO: 92565 - RNA, 20 nt, Artificial Sequence
  LRRK2 RNA guide
ccuucugaacauaaacugug

SEQ ID NO: 92566 - RNA, 20 nt, Artificial Sequence
  LRRK2 RNA guide
cucacaguuuauguucagaa

SEQ ID NO: 92567 - RNA, 20 nt, Artificial Sequence
  LRRK2 RNA guide
cugaacauaaacugugagcc

SEQ ID NO: 92568 - RNA, 20 nt, Artificial Sequence
  LRRK2 RNA guide
cuguuggcccuucugaacau

SEQ ID NO: 92569 - RNA, 20 nt, Artificial Sequence
  LRRK2 RNA guide
cuucugaacauaaacuguga

SEQ ID NO: 92570 - RNA, 20 nt, Artificial Sequence
  LRRK2 RNA guide
gaacauaaacugugagcccu

SEQ ID NO: 92571 - RNA, 20 nt, Artificial Sequence
  LRRK2 RNA guide
gaagggcucacaguuuaugu

SEQ ID NO: 92572 - RNA, 20 nt, Artificial Sequence
  LRRK2 RNA guide
gaccuguuggcccuucugaa

SEQ ID NO: 92573 - RNA, 20 nt, Artificial Sequence
  LRRK2 RNA guide
gagaagggcucacaguuuau

SEQ ID NO: 92574 - RNA, 20 nt, Artificial Sequence
  LRRK2 RNA guide
gagaccuguuggcccuucug

SEQ ID NO: 92575 - RNA, 20 nt, Artificial Sequence
  LRRK2 RNA guide
gcccuucugaacauaaacug

SEQ ID NO: 92576 - RNA, 20 nt, Artificial Sequence
  LRRK2 RNA guide
gcucacaguuuauguucaga

SEQ ID NO: 92577 - RNA, 20 nt, Artificial Sequence
  LRRK2 RNA guide
ggagaccuguuggcccuucu

SEQ ID NO: 92578 - RNA, 20 nt, Artificial Sequence
  LRRK2 RNA guide
ggcccuucugaacauaaacu

SEQ ID NO: 92579 - RNA, 20 nt, Artificial Sequence
  LRRK2 RNA guide
ggcucacaguuuauguucag

SEQ ID NO: 92580 - RNA, 20 nt, Artificial Sequence
  LRRK2 RNA guide
gggcucacaguuuauguuca

SEQ ID NO: 92581 - RNA, 20 nt, Artificial Sequence
  LRRK2 RNA guide
gugagaagggcucacaguuu

SEQ ID NO: 92582 - RNA, 20 nt, Artificial Sequence
  LRRK2 RNA guide
guucagaagggccaacaggu

SEQ ID NO: 92583 - RNA, 20 nt, Artificial Sequence
  LRRK2 RNA guide
guuggcccuucugaacauaa

SEQ ID NO: 92584 - RNA, 20 nt, Artificial Sequence
  LRRK2 RNA guide
guuuauguucagaagggcca

SEQ ID NO: 92585 - RNA, 20 nt, Artificial Sequence
  LRRK2 RNA guide
uauguucagaagggccaaca

SEQ ID NO: 92586 - RNA, 20 nt, Artificial Sequence
  LRRK2 RNA guide
ucacaguuuauguucagaag

SEQ ID NO: 92587 - RNA, 20 nt, Artificial Sequence
  LRRK2 RNA guide
ucugaacauaaacugugagc

SEQ ID NO: 92588 - RNA, 20 nt, Artificial Sequence
  LRRK2 RNA guide
ugaacauaaacugugagccc

SEQ ID NO: 92589 - RNA, 20 nt, Artificial Sequence
  LRRK2 RNA guide
ugagaagggcucacaguuua

SEQ ID NO: 92590 - RNA, 20 nt, Artificial Sequence
  LRRK2 RNA guide
uggcccuucugaacauaaac

SEQ ID NO: 92591 - RNA, 20 nt, Artificial Sequence
  LRRK2 RNA guide
uguucagaagggccaacagg

SEQ ID NO: 92592 - RNA, 20 nt, Artificial Sequence
  LRRK2 RNA guide
uguuggcccuucugaacaua

SEQ ID NO: 92593 - RNA, 20 nt, Artificial Sequence
  LRRK2 RNA guide
uuauguucagaagggccaac

SEQ ID NO: 92594 - RNA, 20 nt, Artificial Sequence
  LRRK2 RNA guide
uucagaagggccaacagguc

SEQ ID NO: 92595 - RNA, 20 nt, Artificial Sequence
  LRRK2 RNA guide
uucugaacauaaacugugag

SEQ ID NO: 92596 - RNA, 20 nt, Artificial Sequence
  LRRK2 RNA guide
uuggcccuucugaacauaaa

SEQ ID NO: 92597 - RNA, 20 nt, Artificial Sequence
  LRRK2 RNA guide
uuuauguucagaagggccaa

SEQ ID NO: 92598 - RNA, 21 nt, Artificial Sequence
  LRRK2 RNA guide
aaggagaccuguuggcccuuc

SEQ ID NO: 92599 - RNA, 21 nt, Artificial Sequence
  LRRK2 RNA guide
aagggcucacaguuuauguuc

SEQ ID NO: 92600 - RNA, 21 nt, Artificial Sequence
  LRRK2 RNA guide
acaguuuauguucagaagggc

SEQ ID NO: 92601 - RNA, 21 nt, Artificial Sequence
  LRRK2 RNA guide
accuguuggcccuucugaaca

SEQ ID NO: 92602 - RNA, 21 nt, Artificial Sequence
  LRRK2 RNA guide
agaagggcucacaguuuaugu

SEQ ID NO: 92603 - RNA, 21 nt, Artificial Sequence
  LRRK2 RNA guide
agaccuguuggcccuucugaa

SEQ ID NO: 92604 - RNA, 21 nt, Artificial Sequence
  LRRK2 RNA guide
aggagaccuguuggcccuucu

SEQ ID NO: 92605 - RNA, 21 nt, Artificial Sequence
  LRRK2 RNA guide
agggcucacaguuuauguuca

SEQ ID NO: 92606 - RNA, 21 nt, Artificial Sequence
  LRRK2 RNA guide
aguuuauguucagaagggcca

SEQ ID NO: 92607 - RNA, 21 nt, Artificial Sequence
  LRRK2 RNA guide
auguucagaagggccaacagg

SEQ ID NO: 92608 - RNA, 21 nt, Artificial Sequence
  LRRK2 RNA guide
caaggagaccuguuggcccuu

SEQ ID NO: 92609 - RNA, 21 nt, Artificial Sequence
  LRRK2 RNA guide
cacaguuuauguucagaaggg

SEQ ID NO: 92610 - RNA, 21 nt, Artificial Sequence
  LRRK2 RNA guide
caguuuauguucagaagggcc

SEQ ID NO: 92611 - RNA, 21 nt, Artificial Sequence
  LRRK2 RNA guide
cccuucugaacauaaacugug

SEQ ID NO: 92612 - RNA, 21 nt, Artificial Sequence
  LRRK2 RNA guide
ccuguuggcccuucugaacau

SEQ ID NO: 92613 - RNA, 21 nt, Artificial Sequence
  LRRK2 RNA guide
ccuucugaacauaaacuguga

SEQ ID NO: 92614 - RNA, 21 nt, Artificial Sequence
  LRRK2 RNA guide
cucacaguuuauguucagaag

SEQ ID NO: 92615 - RNA, 21 nt, Artificial Sequence
  LRRK2 RNA guide
cugaacauaaacugugagccc

SEQ ID NO: 92616 - RNA, 21 nt, Artificial Sequence
  LRRK2 RNA guide
cuguuggcccuucugaacaua

SEQ ID NO: 92617 - RNA, 21 nt, Artificial Sequence
  LRRK2 RNA guide
cuucugaacauaaacugugag

SEQ ID NO: 92618 - RNA, 21 nt, Artificial Sequence
  LRRK2 RNA guide
gaacauaaacugugagcccuu

SEQ ID NO: 92619 - RNA, 21 nt, Artificial Sequence
  LRRK2 RNA guide
gaagggcucacaguuuauguu

SEQ ID NO: 92620 - RNA, 21 nt, Artificial Sequence
  LRRK2 RNA guide
gaccuguuggcccuucugaac

SEQ ID NO: 92621 - RNA, 21 nt, Artificial Sequence
  LRRK2 RNA guide
gagaagggcucacaguuuaug

SEQ ID NO: 92622 - RNA, 21 nt, Artificial Sequence
  LRRK2 RNA guide
gagaccuguuggcccuucuga

SEQ ID NO: 92623 - RNA, 21 nt, Artificial Sequence
  LRRK2 RNA guide
gcccuucugaacauaaacugu

SEQ ID NO: 92624 - RNA, 21 nt, Artificial Sequence
  LRRK2 RNA guide
gcucacaguuuauguucagaa

SEQ ID NO: 92625 - RNA, 21 nt, Artificial Sequence
  LRRK2 RNA guide
ggagaccuguuggcccuucug

SEQ ID NO: 92626 - RNA, 21 nt, Artificial Sequence
  LRRK2 RNA guide
ggcccuucugaacauaaacug

SEQ ID NO: 92627 - RNA, 21 nt, Artificial Sequence
  LRRK2 RNA guide
ggcucacaguuuauguucaga

SEQ ID NO: 92628 - RNA, 21 nt, Artificial Sequence
  LRRK2 RNA guide
gggcucacaguuuauguucag

SEQ ID NO: 92629 - RNA, 21 nt, Artificial Sequence
  LRRK2 RNA guide
gugagaagggcucacaguuua

SEQ ID NO: 92630 - RNA, 21 nt, Artificial Sequence
  LRRK2 RNA guide
guucagaagggccaacagguc

SEQ ID NO: 92631 - RNA, 21 nt, Artificial Sequence
  LRRK2 RNA guide
guuggcccuucugaacauaaa

SEQ ID NO: 92632 - RNA, 21 nt, Artificial Sequence
  LRRK2 RNA guide
guuuauguucagaagggccaa

SEQ ID NO: 92633 - RNA, 21 nt, Artificial Sequence
  LRRK2 RNA guide
uauguucagaagggccaacag

SEQ ID NO: 92634 - RNA, 21 nt, Artificial Sequence
  LRRK2 RNA guide
ucaaggagaccuguuggcccu

SEQ ID NO: 92635 - RNA, 21 nt, Artificial Sequence
  LRRK2 RNA guide
ucacaguuuauguucagaagg

SEQ ID NO: 92636 - RNA, 21 nt, Artificial Sequence
  LRRK2 RNA guide
ucugaacauaaacugugagcc

SEQ ID NO: 92637 - RNA, 21 nt, Artificial Sequence
  LRRK2 RNA guide
ugaacauaaacugugagcccu

SEQ ID NO: 92638 - RNA, 21 nt, Artificial Sequence
  LRRK2 RNA guide
ugagaagggcucacaguuuau

SEQ ID NO: 92639 - RNA, 21 nt, Artificial Sequence
  LRRK2 RNA guide
uggcccuucugaacauaaacu

SEQ ID NO: 92640 - RNA, 21 nt, Artificial Sequence
  LRRK2 RNA guide
ugugagaagggcucacaguuu

SEQ ID NO: 92641 - RNA, 21 nt, Artificial Sequence
  LRRK2 RNA guide
uguucagaagggccaacaggu

SEQ ID NO: 92642 - RNA, 21 nt, Artificial Sequence
  LRRK2 RNA guide
uguuggcccuucugaacauaa

SEQ ID NO: 92643 - RNA, 21 nt, Artificial Sequence
  LRRK2 RNA guide
uuauguucagaagggccaaca

SEQ ID NO: 92644 - RNA, 21 nt, Artificial Sequence
  LRRK2 RNA guide
uucagaagggccaacaggucu

SEQ ID NO: 92645 - RNA, 21 nt, Artificial Sequence
  LRRK2 RNA guide
uucugaacauaaacugugagc

SEQ ID NO: 92646 - RNA, 21 nt, Artificial Sequence
  LRRK2 RNA guide
uuggcccuucugaacauaaac

SEQ ID NO: 92647 - RNA, 21 nt, Artificial Sequence
  LRRK2 RNA guide
uuuauguucagaagggccaac

SEQ ID NO: 92648 - RNA, 22 nt, Artificial Sequence
  LRRK2 RNA guide
aaggagaccuguuggcccuucu

SEQ ID NO: 92649 - RNA, 22 nt, Artificial Sequence
  LRRK2 RNA guide
aagggcucacaguuuauguuca

SEQ ID NO: 92650 - RNA, 22 nt, Artificial Sequence
  LRRK2 RNA guide
acaguuuauguucagaagggcc

SEQ ID NO: 92651 - RNA, 22 nt, Artificial Sequence
  LRRK2 RNA guide
accuguuggcccuucugaacau

SEQ ID NO: 92652 - RNA, 22 nt, Artificial Sequence
  LRRK2 RNA guide
agaagggcucacaguuuauguu

SEQ ID NO: 92653 - RNA, 22 nt, Artificial Sequence
  LRRK2 RNA guide
agaccuguuggcccuucugaac

SEQ ID NO: 92654 - RNA, 22 nt, Artificial Sequence
  LRRK2 RNA guide
aggagaccuguuggcccuucug

SEQ ID NO: 92655 - RNA, 22 nt, Artificial Sequence
  LRRK2 RNA guide
agggcucacaguuuauguucag

SEQ ID NO: 92656 - RNA, 22 nt, Artificial Sequence
  LRRK2 RNA guide
aguuuauguucagaagggccaa

SEQ ID NO: 92657 - RNA, 22 nt, Artificial Sequence
  LRRK2 RNA guide
aucaaggagaccuguuggcccu

SEQ ID NO: 92658 - RNA, 22 nt, Artificial Sequence
  LRRK2 RNA guide
auguucagaagggccaacaggu

SEQ ID NO: 92659 - RNA, 22 nt, Artificial Sequence
  LRRK2 RNA guide
caaggagaccuguuggcccuuc

SEQ ID NO: 92660 - RNA, 22 nt, Artificial Sequence
  LRRK2 RNA guide
cacaguuuauguucagaagggc

SEQ ID NO: 92661 - RNA, 22 nt, Artificial Sequence
  LRRK2 RNA guide
caguuuauguucagaagggcca

SEQ ID NO: 92662 - RNA, 22 nt, Artificial Sequence
  LRRK2 RNA guide
cccuucugaacauaaacuguga

SEQ ID NO: 92663 - RNA, 22 nt, Artificial Sequence
  LRRK2 RNA guide
ccuguuggcccuucugaacaua

SEQ ID NO: 92664 - RNA, 22 nt, Artificial Sequence
  LRRK2 RNA guide
ccuucugaacauaaacugugag

SEQ ID NO: 92665 - RNA, 22 nt, Artificial Sequence
  LRRK2 RNA guide
cucacaguuuauguucagaagg

SEQ ID NO: 92666 - RNA, 22 nt, Artificial Sequence
  LRRK2 RNA guide
cugaacauaaacugugagcccu

SEQ ID NO: 92667 - RNA, 22 nt, Artificial Sequence
  LRRK2 RNA guide
cuguuggcccuucugaacauaa

SEQ ID NO: 92668 - RNA, 22 nt, Artificial Sequence
  LRRK2 RNA guide
cuucugaacauaaacugugagc

SEQ ID NO: 92669 - RNA, 22 nt, Artificial Sequence
  LRRK2 RNA guide
gaacauaaacugugagcccuuc

SEQ ID NO: 92670 - RNA, 22 nt, Artificial Sequence
  LRRK2 RNA guide
gaagggcucacaguuuauguuc

SEQ ID NO: 92671 - RNA, 22 nt, Artificial Sequence
  LRRK2 RNA guide
gaccuguuggcccuucugaaca

SEQ ID NO: 92672 - RNA, 22 nt, Artificial Sequence
  LRRK2 RNA guide
gagaagggcucacaguuuaugu

SEQ ID NO: 92673 - RNA, 22 nt, Artificial Sequence
  LRRK2 RNA guide
gagaccuguuggcccuucugaa

SEQ ID NO: 92674 - RNA, 22 nt, Artificial Sequence
  LRRK2 RNA guide
gcccuucugaacauaaacugug

SEQ ID NO: 92675 - RNA, 22 nt, Artificial Sequence
  LRRK2 RNA guide
gcucacaguuuauguucagaag

SEQ ID NO: 92676 - RNA, 22 nt, Artificial Sequence
  LRRK2 RNA guide
ggagaccuguuggcccuucuga

SEQ ID NO: 92677 - RNA, 22 nt, Artificial Sequence
  LRRK2 RNA guide
ggcccuucugaacauaaacugu

SEQ ID NO: 92678 - RNA, 22 nt, Artificial Sequence
  LRRK2 RNA guide
ggcucacaguuuauguucagaa

SEQ ID NO: 92679 - RNA, 22 nt, Artificial Sequence
  LRRK2 RNA guide
gggcucacaguuuauguucaga

SEQ ID NO: 92680 - RNA, 22 nt, Artificial Sequence
  LRRK2 RNA guide
gugagaagggcucacaguuuau

SEQ ID NO: 92681 - RNA, 22 nt, Artificial Sequence
  LRRK2 RNA guide
guucagaagggccaacaggucu

SEQ ID NO: 92682 - RNA, 22 nt, Artificial Sequence
  LRRK2 RNA guide
guuggcccuucugaacauaaac

SEQ ID NO: 92683 - RNA, 22 nt, Artificial Sequence
  LRRK2 RNA guide
guuuauguucagaagggccaac

SEQ ID NO: 92684 - RNA, 22 nt, Artificial Sequence
  LRRK2 RNA guide
uauguucagaagggccaacagg

SEQ ID NO: 92685 - RNA, 22 nt, Artificial Sequence
  LRRK2 RNA guide
ucaaggagaccuguuggcccuu

SEQ ID NO: 92686 - RNA, 22 nt, Artificial Sequence
  LRRK2 RNA guide
ucacaguuuauguucagaaggg

SEQ ID NO: 92687 - RNA, 22 nt, Artificial Sequence
  LRRK2 RNA guide
ucugaacauaaacugugagccc

SEQ ID NO: 92688 - RNA, 22 nt, Artificial Sequence
  LRRK2 RNA guide
ugaacauaaacugugagcccuu

SEQ ID NO: 92689 - RNA, 22 nt, Artificial Sequence
  LRRK2 RNA guide
ugagaagggcucacaguuuaug

SEQ ID NO: 92690 - RNA, 22 nt, Artificial Sequence
  LRRK2 RNA guide
uggcccuucugaacauaaacug

SEQ ID NO: 92691 - RNA, 22 nt, Artificial Sequence
  LRRK2 RNA guide
ugugagaagggcucacaguuua

SEQ ID NO: 92692 - RNA, 22 nt, Artificial Sequence
  LRRK2 RNA guide
uguucagaagggccaacagguc

SEQ ID NO: 92693 - RNA, 22 nt, Artificial Sequence
  LRRK2 RNA guide
uguuggcccuucugaacauaaa

SEQ ID NO: 92694 - RNA, 22 nt, Artificial Sequence
  LRRK2 RNA guide
uuauguucagaagggccaacag

SEQ ID NO: 92695 - RNA, 22 nt, Artificial Sequence
  LRRK2 RNA guide
uucagaagggccaacaggucuc

SEQ ID NO: 92696 - RNA, 22 nt, Artificial Sequence
  LRRK2 RNA guide
uucugaacauaaacugugagcc

SEQ ID NO: 92697 - RNA, 22 nt, Artificial Sequence
  LRRK2 RNA guide
uuggcccuucugaacauaaacu

SEQ ID NO: 92698 - RNA, 22 nt, Artificial Sequence
  LRRK2 RNA guide
uugugagaagggcucacaguuu

SEQ ID NO: 92699 - RNA, 22 nt, Artificial Sequence
  LRRK2 RNA guide
uuuauguucagaagggccaaca

SEQ ID NO: 92700 - RNA, 20 nt, Artificial Sequence
  LRRK2 RNA guide
acaguuuauguuacagaagg

SEQ ID NO: 92701 - RNA, 20 nt, Artificial Sequence
  LRRK2 RNA guide
accuguuggcccuucuguaa

SEQ ID NO: 92702 - RNA, 20 nt, Artificial Sequence
  LRRK2 RNA guide
agaccuguuggcccuucugu

SEQ ID NO: 92703 - RNA, 20 nt, Artificial Sequence
  LRRK2 RNA guide
agggcucacaguuuauguua

SEQ ID NO: 92704 - RNA, 20 nt, Artificial Sequence
  LRRK2 RNA guide
aguuuauguuacagaagggc

SEQ ID NO: 92705 - RNA, 20 nt, Artificial Sequence
  LRRK2 RNA guide
auguuacagaagggccaaca

SEQ ID NO: 92706 - RNA, 20 nt, Artificial Sequence
  LRRK2 RNA guide
cacaguuuauguuacagaag

SEQ ID NO: 92707 - RNA, 20 nt, Artificial Sequence
  LRRK2 RNA guide
caguuuauguuacagaaggg

SEQ ID NO: 92708 - RNA, 20 nt, Artificial Sequence
  LRRK2 RNA guide
cccuucuguaacauaaacug

SEQ ID NO: 92709 - RNA, 20 nt, Artificial Sequence
  LRRK2 RNA guide
ccuguuggcccuucuguaac

SEQ ID NO: 92710 - RNA, 20 nt, Artificial Sequence
  LRRK2 RNA guide
ccuucuguaacauaaacugu

SEQ ID NO: 92711 - RNA, 20 nt, Artificial Sequence
  LRRK2 RNA guide
cucacaguuuauguuacaga

SEQ ID NO: 92712 - RNA, 20 nt, Artificial Sequence
  LRRK2 RNA guide
cuguaacauaaacugugagc

SEQ ID NO: 92713 - RNA, 20 nt, Artificial Sequence
  LRRK2 RNA guide
cuguuggcccuucuguaaca

SEQ ID NO: 92714 - RNA, 20 nt, Artificial Sequence
  LRRK2 RNA guide
cuucuguaacauaaacugug

SEQ ID NO: 92715 - RNA, 20 nt, Artificial Sequence
  LRRK2 RNA guide
gaccuguuggcccuucugua

SEQ ID NO: 92716 - RNA, 20 nt, Artificial Sequence
  LRRK2 RNA guide
gcccuucuguaacauaaacu

SEQ ID NO: 92717 - RNA, 20 nt, Artificial Sequence
  LRRK2 RNA guide
gcucacaguuuauguuacag

SEQ ID NO: 92718 - RNA, 20 nt, Artificial Sequence
  LRRK2 RNA guide
ggcccuucuguaacauaaac

SEQ ID NO: 92719 - RNA, 20 nt, Artificial Sequence
  LRRK2 RNA guide
ggcucacaguuuauguuaca

SEQ ID NO: 92720 - RNA, 20 nt, Artificial Sequence
  LRRK2 RNA guide
gggcucacaguuuauguuac

SEQ ID NO: 92721 - RNA, 20 nt, Artificial Sequence
  LRRK2 RNA guide
guaacauaaacugugagccc

SEQ ID NO: 92722 - RNA, 20 nt, Artificial Sequence
  LRRK2 RNA guide
guuacagaagggccaacagg

SEQ ID NO: 92723 - RNA, 20 nt, Artificial Sequence
  LRRK2 RNA guide
guuggcccuucuguaacaua

SEQ ID NO: 92724 - RNA, 20 nt, Artificial Sequence
  LRRK2 RNA guide
guuuauguuacagaagggcc

SEQ ID NO: 92725 - RNA, 20 nt, Artificial Sequence
  LRRK2 RNA guide
uaacauaaacugugagcccu

SEQ ID NO: 92726 - RNA, 20 nt, Artificial Sequence
  LRRK2 RNA guide
uauguuacagaagggccaac

SEQ ID NO: 92727 - RNA, 20 nt, Artificial Sequence
  LRRK2 RNA guide
ucacaguuuauguuacagaa

SEQ ID NO: 92728 - RNA, 20 nt, Artificial Sequence
  LRRK2 RNA guide
ucuguaacauaaacugugag

SEQ ID NO: 92729 - RNA, 20 nt, Artificial Sequence
  LRRK2 RNA guide
uggcccuucuguaacauaaa

SEQ ID NO: 92730 - RNA, 20 nt, Artificial Sequence
  LRRK2 RNA guide
uguaacauaaacugugagcc

SEQ ID NO: 92731 - RNA, 20 nt, Artificial Sequence
  LRRK2 RNA guide
uguuacagaagggccaacag

SEQ ID NO: 92732 - RNA, 20 nt, Artificial Sequence
  LRRK2 RNA guide
uguuggcccuucuguaacau

SEQ ID NO: 92733 - RNA, 20 nt, Artificial Sequence
  LRRK2 RNA guide
uuacagaagggccaacaggu

SEQ ID NO: 92734 - RNA, 20 nt, Artificial Sequence
  LRRK2 RNA guide
uuauguuacagaagggccaa

SEQ ID NO: 92735 - RNA, 20 nt, Artificial Sequence
  LRRK2 RNA guide
uucuguaacauaaacuguga

SEQ ID NO: 92736 - RNA, 20 nt, Artificial Sequence
  LRRK2 RNA guide
uuggcccuucuguaacauaa

SEQ ID NO: 92737 - RNA, 20 nt, Artificial Sequence
  LRRK2 RNA guide
uuuauguuacagaagggcca

SEQ ID NO: 92738 - RNA, 21 nt, Artificial Sequence
  LRRK2 RNA guide
aagggcucacaguuuauguua

SEQ ID NO: 92739 - RNA, 21 nt, Artificial Sequence
  LRRK2 RNA guide
acaguuuauguuacagaaggg

SEQ ID NO: 92740 - RNA, 21 nt, Artificial Sequence
  LRRK2 RNA guide
accuguuggcccuucuguaac

SEQ ID NO: 92741 - RNA, 21 nt, Artificial Sequence
  LRRK2 RNA guide
agaccuguuggcccuucugua

SEQ ID NO: 92742 - RNA, 21 nt, Artificial Sequence
  LRRK2 RNA guide
agggcucacaguuuauguuac

SEQ ID NO: 92743 - RNA, 21 nt, Artificial Sequence
  LRRK2 RNA guide
aguuuauguuacagaagggcc

SEQ ID NO: 92744 - RNA, 21 nt, Artificial Sequence
  LRRK2 RNA guide
auguuacagaagggccaacag

SEQ ID NO: 92745 - RNA, 21 nt, Artificial Sequence
  LRRK2 RNA guide
cacaguuuauguuacagaagg

SEQ ID NO: 92746 - RNA, 21 nt, Artificial Sequence
  LRRK2 RNA guide
caguuuauguuacagaagggc

SEQ ID NO: 92747 - RNA, 21 nt, Artificial Sequence
  LRRK2 RNA guide
cccuucuguaacauaaacugu

SEQ ID NO: 92748 - RNA, 21 nt, Artificial Sequence
  LRRK2 RNA guide
ccuguuggcccuucuguaaca

SEQ ID NO: 92749 - RNA, 21 nt, Artificial Sequence
  LRRK2 RNA guide
ccuucuguaacauaaacugug

SEQ ID NO: 92750 - RNA, 21 nt, Artificial Sequence
  LRRK2 RNA guide
cucacaguuuauguuacagaa

SEQ ID NO: 92751 - RNA, 21 nt, Artificial Sequence
  LRRK2 RNA guide
cuguaacauaaacugugagcc

SEQ ID NO: 92752 - RNA, 21 nt, Artificial Sequence
  LRRK2 RNA guide
cuguuggcccuucuguaacau

SEQ ID NO: 92753 - RNA, 21 nt, Artificial Sequence
  LRRK2 RNA guide
cuucuguaacauaaacuguga

SEQ ID NO: 92754 - RNA, 21 nt, Artificial Sequence
  LRRK2 RNA guide
gaccuguuggcccuucuguaa

SEQ ID NO: 92755 - RNA, 21 nt, Artificial Sequence
  LRRK2 RNA guide
gagaccuguuggcccuucugu

SEQ ID NO: 92756 - RNA, 21 nt, Artificial Sequence
  LRRK2 RNA guide
gcccuucuguaacauaaacug

SEQ ID NO: 92757 - RNA, 21 nt, Artificial Sequence
  LRRK2 RNA guide
gcucacaguuuauguuacaga

SEQ ID NO: 92758 - RNA, 21 nt, Artificial Sequence
  LRRK2 RNA guide
ggcccuucuguaacauaaacu

SEQ ID NO: 92759 - RNA, 21 nt, Artificial Sequence
  LRRK2 RNA guide
ggcucacaguuuauguuacag

SEQ ID NO: 92760 - RNA, 21 nt, Artificial Sequence
  LRRK2 RNA guide
gggcucacaguuuauguuaca

SEQ ID NO: 92761 - RNA, 21 nt, Artificial Sequence
  LRRK2 RNA guide
guaacauaaacugugagcccu

SEQ ID NO: 92762 - RNA, 21 nt, Artificial Sequence
  LRRK2 RNA guide
guuacagaagggccaacaggu

SEQ ID NO: 92763 - RNA, 21 nt, Artificial Sequence
  LRRK2 RNA guide
guuggcccuucuguaacauaa

SEQ ID NO: 92764 - RNA, 21 nt, Artificial Sequence
  LRRK2 RNA guide
guuuauguuacagaagggcca

SEQ ID NO: 92765 - RNA, 21 nt, Artificial Sequence
  LRRK2 RNA guide
uaacauaaacugugagcccuu

SEQ ID NO: 92766 - RNA, 21 nt, Artificial Sequence
  LRRK2 RNA guide
uauguuacagaagggccaaca

SEQ ID NO: 92767 - RNA, 21 nt, Artificial Sequence
  LRRK2 RNA guide
ucacaguuuauguuacagaag

SEQ ID NO: 92768 - RNA, 21 nt, Artificial Sequence
  LRRK2 RNA guide
ucuguaacauaaacugugagc

SEQ ID NO: 92769 - RNA, 21 nt, Artificial Sequence
  LRRK2 RNA guide
uggcccuucuguaacauaaac

SEQ ID NO: 92770 - RNA, 21 nt, Artificial Sequence
  LRRK2 RNA guide
uguaacauaaacugugagccc

SEQ ID NO: 92771 - RNA, 21 nt, Artificial Sequence
  LRRK2 RNA guide
uguuacagaagggccaacagg

SEQ ID NO: 92772 - RNA, 21 nt, Artificial Sequence
  LRRK2 RNA guide
uguuggcccuucuguaacaua

SEQ ID NO: 92773 - RNA, 21 nt, Artificial Sequence
  LRRK2 RNA guide
uuacagaagggccaacagguc

SEQ ID NO: 92774 - RNA, 21 nt, Artificial Sequence
  LRRK2 RNA guide
uuauguuacagaagggccaac

SEQ ID NO: 92775 - RNA, 21 nt, Artificial Sequence
  LRRK2 RNA guide
uucuguaacauaaacugugag

SEQ ID NO: 92776 - RNA, 21 nt, Artificial Sequence
  LRRK2 RNA guide
uuggcccuucuguaacauaaa

SEQ ID NO: 92777 - RNA, 21 nt, Artificial Sequence
  LRRK2 RNA guide
uuuauguuacagaagggccaa

SEQ ID NO: 92778 - RNA, 22 nt, Artificial Sequence
  LRRK2 RNA guide
aagggcucacaguuuauguuac

SEQ ID NO: 92779 - RNA, 22 nt, Artificial Sequence
  LRRK2 RNA guide
acaguuuauguuacagaagggc

SEQ ID NO: 92780 - RNA, 22 nt, Artificial Sequence
  LRRK2 RNA guide
accuguuggcccuucuguaaca

SEQ ID NO: 92781 - RNA, 22 nt, Artificial Sequence
  LRRK2 RNA guide
agaccuguuggcccuucuguaa

SEQ ID NO: 92782 - RNA, 22 nt, Artificial Sequence
  LRRK2 RNA guide
agggcucacaguuuauguuaca

SEQ ID NO: 92783 - RNA, 22 nt, Artificial Sequence
  LRRK2 RNA guide
aguuuauguuacagaagggcca

SEQ ID NO: 92784 - RNA, 22 nt, Artificial Sequence
  LRRK2 RNA guide
auguuacagaagggccaacagg

SEQ ID NO: 92785 - RNA, 22 nt, Artificial Sequence
  LRRK2 RNA guide
cacaguuuauguuacagaaggg

SEQ ID NO: 92786 - RNA, 22 nt, Artificial Sequence
  LRRK2 RNA guide
caguuuauguuacagaagggcc

SEQ ID NO: 92787 - RNA, 22 nt, Artificial Sequence
  LRRK2 RNA guide
cccuucuguaacauaaacugug

SEQ ID NO: 92788 - RNA, 22 nt, Artificial Sequence
  LRRK2 RNA guide
ccuguuggcccuucuguaacau

SEQ ID NO: 92789 - RNA, 22 nt, Artificial Sequence
  LRRK2 RNA guide
ccuucuguaacauaaacuguga

SEQ ID NO: 92790 - RNA, 22 nt, Artificial Sequence
  LRRK2 RNA guide
cucacaguuuauguuacagaag

SEQ ID NO: 92791 - RNA, 22 nt, Artificial Sequence
  LRRK2 RNA guide
cuguaacauaaacugugagccc

SEQ ID NO: 92792 - RNA, 22 nt, Artificial Sequence
  LRRK2 RNA guide
cuguuggcccuucuguaacaua

SEQ ID NO: 92793 - RNA, 22 nt, Artificial Sequence
  LRRK2 RNA guide
cuucuguaacauaaacugugag

SEQ ID NO: 92794 - RNA, 22 nt, Artificial Sequence
  LRRK2 RNA guide
gaagggcucacaguuuauguua

SEQ ID NO: 92795 - RNA, 22 nt, Artificial Sequence
  LRRK2 RNA guide
gaccuguuggcccuucuguaac

SEQ ID NO: 92796 - RNA, 22 nt, Artificial Sequence
  LRRK2 RNA guide
gagaccuguuggcccuucugua

SEQ ID NO: 92797 - RNA, 22 nt, Artificial Sequence
  LRRK2 RNA guide
gcccuucuguaacauaaacugu

SEQ ID NO: 92798 - RNA, 22 nt, Artificial Sequence
  LRRK2 RNA guide
gcucacaguuuauguuacagaa

SEQ ID NO: 92799 - RNA, 22 nt, Artificial Sequence
  LRRK2 RNA guide
ggagaccuguuggcccuucugu

SEQ ID NO: 92800 - RNA, 22 nt, Artificial Sequence
  LRRK2 RNA guide
ggcccuucuguaacauaaacug

SEQ ID NO: 92801 - RNA, 22 nt, Artificial Sequence
  LRRK2 RNA guide
ggcucacaguuuauguuacaga

SEQ ID NO: 92802 - RNA, 22 nt, Artificial Sequence
  LRRK2 RNA guide
gggcucacaguuuauguuacag

SEQ ID NO: 92803 - RNA, 22 nt, Artificial Sequence
  LRRK2 RNA guide
guaacauaaacugugagcccuu

SEQ ID NO: 92804 - RNA, 22 nt, Artificial Sequence
  LRRK2 RNA guide
guuacagaagggccaacagguc

SEQ ID NO: 92805 - RNA, 22 nt, Artificial Sequence
  LRRK2 RNA guide
guuggcccuucuguaacauaaa

SEQ ID NO: 92806 - RNA, 22 nt, Artificial Sequence
  LRRK2 RNA guide
guuuauguuacagaagggccaa

SEQ ID NO: 92807 - RNA, 22 nt, Artificial Sequence
  LRRK2 RNA guide
uaacauaaacugugagcccuuc

SEQ ID NO: 92808 - RNA, 22 nt, Artificial Sequence
  LRRK2 RNA guide
uauguuacagaagggccaacag

SEQ ID NO: 92809 - RNA, 22 nt, Artificial Sequence
  LRRK2 RNA guide
ucacaguuuauguuacagaagg

SEQ ID NO: 92810 - RNA, 22 nt, Artificial Sequence
  LRRK2 RNA guide
ucuguaacauaaacugugagcc

SEQ ID NO: 92811 - RNA, 22 nt, Artificial Sequence
  LRRK2 RNA guide
uggcccuucuguaacauaaacu

SEQ ID NO: 92812 - RNA, 22 nt, Artificial Sequence
  LRRK2 RNA guide
uguaacauaaacugugagcccu

SEQ ID NO: 92813 - RNA, 22 nt, Artificial Sequence
  LRRK2 RNA guide
uguuacagaagggccaacaggu

SEQ ID NO: 92814 - RNA, 22 nt, Artificial Sequence
  LRRK2 RNA guide
uguuggcccuucuguaacauaa

SEQ ID NO: 92815 - RNA, 22 nt, Artificial Sequence
  LRRK2 RNA guide
uuacagaagggccaacaggucu

SEQ ID NO: 92816 - RNA, 22 nt, Artificial Sequence
  LRRK2 RNA guide
uuauguuacagaagggccaaca

SEQ ID NO: 92817 - RNA, 22 nt, Artificial Sequence
  LRRK2 RNA guide
uucuguaacauaaacugugagc

SEQ ID NO: 92818 - RNA, 22 nt, Artificial Sequence
  LRRK2 RNA guide
uuggcccuucuguaacauaaac

SEQ ID NO: 92819 - RNA, 22 nt, Artificial Sequence
  LRRK2 RNA guide
uuuauguuacagaagggccaac

SEQ ID NO: 92820 - RNA, 20 nt, Artificial Sequence
  LRRK2 RNA guide
aaaguuuuacaugaagucuc

SEQ ID NO: 92821 - RNA, 20 nt, Artificial Sequence
  LRRK2 RNA guide
aacauugagacuucauguaa

SEQ ID NO: 92822 - RNA, 20 nt, Artificial Sequence
  LRRK2 RNA guide
aagucucaauguuacaaagg

SEQ ID NO: 92823 - RNA, 20 nt, Artificial Sequence
  LRRK2 RNA guide
acaugaagucucaauguuac

SEQ ID NO: 92824 - RNA, 20 nt, Artificial Sequence
  LRRK2 RNA guide
acauugagacuucauguaaa

SEQ ID NO: 92825 - RNA, 20 nt, Artificial Sequence
  LRRK2 RNA guide
agagucaaaaguuuuacaug

SEQ ID NO: 92826 - RNA, 20 nt, Artificial Sequence
  LRRK2 RNA guide
agucucaauguuacaaagga

SEQ ID NO: 92827 - RNA, 20 nt, Artificial Sequence
  LRRK2 RNA guide
aguuuuacaugaagucucaa

SEQ ID NO: 92828 - RNA, 20 nt, Artificial Sequence
  LRRK2 RNA guide
augaagucucaauguuacaa

SEQ ID NO: 92829 - RNA, 20 nt, Artificial Sequence
  LRRK2 RNA guide
auguuccuuuguaacauuga

SEQ ID NO: 92830 - RNA, 20 nt, Artificial Sequence
  LRRK2 RNA guide
auugagacuucauguaaaac

SEQ ID NO: 92831 - RNA, 20 nt, Artificial Sequence
  LRRK2 RNA guide
caaaaguuuuacaugaaguc

SEQ ID NO: 92832 - RNA, 20 nt, Artificial Sequence
  LRRK2 RNA guide
caugaagucucaauguuaca

SEQ ID NO: 92833 - RNA, 20 nt, Artificial Sequence
  LRRK2 RNA guide
cauugagacuucauguaaaa

SEQ ID NO: 92834 - RNA, 20 nt, Artificial Sequence
  LRRK2 RNA guide
ccuuuguaacauugagacuu

SEQ ID NO: 92835 - RNA, 20 nt, Artificial Sequence
  LRRK2 RNA guide
cuuuguaacauugagacuuc

SEQ ID NO: 92836 - RNA, 20 nt, Artificial Sequence
  LRRK2 RNA guide
gaagucucaauguuacaaag

SEQ ID NO: 92837 - RNA, 20 nt, Artificial Sequence
  LRRK2 RNA guide
gagacuucauguaaaacuuu

SEQ ID NO: 92838 - RNA, 20 nt, Artificial Sequence
  LRRK2 RNA guide
gagucaaaaguuuuacauga

SEQ ID NO: 92839 - RNA, 20 nt, Artificial Sequence
  LRRK2 RNA guide
guaacauugagacuucaugu

SEQ ID NO: 92840 - RNA, 20 nt, Artificial Sequence
  LRRK2 RNA guide
gucaaaaguuuuacaugaag

SEQ ID NO: 92841 - RNA, 20 nt, Artificial Sequence
  LRRK2 RNA guide
gucucaauguuacaaaggaa

SEQ ID NO: 92842 - RNA, 20 nt, Artificial Sequence
  LRRK2 RNA guide
guuccuuuguaacauugaga

SEQ ID NO: 92843 - RNA, 20 nt, Artificial Sequence
  LRRK2 RNA guide
guuuuacaugaagucucaau

SEQ ID NO: 92844 - RNA, 20 nt, Artificial Sequence
  LRRK2 RNA guide
uaacauugagacuucaugua

SEQ ID NO: 92845 - RNA, 20 nt, Artificial Sequence
  LRRK2 RNA guide
uacaugaagucucaauguua

SEQ ID NO: 92846 - RNA, 20 nt, Artificial Sequence
  LRRK2 RNA guide
uauguuccuuuguaacauug

SEQ ID NO: 92847 - RNA, 20 nt, Artificial Sequence
  LRRK2 RNA guide
uccuuuguaacauugagacu

SEQ ID NO: 92848 - RNA, 20 nt, Artificial Sequence
  LRRK2 RNA guide
ucucaauguuacaaaggaac

SEQ ID NO: 92849 - RNA, 20 nt, Artificial Sequence
  LRRK2 RNA guide
ugaagucucaauguuacaaa

SEQ ID NO: 92850 - RNA, 20 nt, Artificial Sequence
  LRRK2 RNA guide
ugagacuucauguaaaacuu

SEQ ID NO: 92851 - RNA, 20 nt, Artificial Sequence
  LRRK2 RNA guide
uguaacauugagacuucaug

SEQ ID NO: 92852 - RNA, 20 nt, Artificial Sequence
  LRRK2 RNA guide
uguuccuuuguaacauugag

SEQ ID NO: 92853 - RNA, 20 nt, Artificial Sequence
  LRRK2 RNA guide
uuacaugaagucucaauguu

SEQ ID NO: 92854 - RNA, 20 nt, Artificial Sequence
  LRRK2 RNA guide
uuccuuuguaacauugagac

SEQ ID NO: 92855 - RNA, 20 nt, Artificial Sequence
  LRRK2 RNA guide
uugagacuucauguaaaacu

SEQ ID NO: 92856 - RNA, 20 nt, Artificial Sequence
  LRRK2 RNA guide
uuguaacauugagacuucau

SEQ ID NO: 92857 - RNA, 20 nt, Artificial Sequence
  LRRK2 RNA guide
uuuacaugaagucucaaugu

SEQ ID NO: 92858 - RNA, 20 nt, Artificial Sequence
  LRRK2 RNA guide
uuuguaacauugagacuuca

SEQ ID NO: 92859 - RNA, 20 nt, Artificial Sequence
  LRRK2 RNA guide
uuuuacaugaagucucaaug

SEQ ID NO: 92860 - RNA, 21 nt, Artificial Sequence
  LRRK2 RNA guide
aagucucaauguuacaaagga

SEQ ID NO: 92861 - RNA, 21 nt, Artificial Sequence
  LRRK2 RNA guide
acaugaagucucaauguuaca

SEQ ID NO: 92862 - RNA, 21 nt, Artificial Sequence
  LRRK2 RNA guide
agucucaauguuacaaaggaa

SEQ ID NO: 92863 - RNA, 21 nt, Artificial Sequence
  LRRK2 RNA guide
auguuccuuuguaacauugag

SEQ ID NO: 92864 - RNA, 21 nt, Artificial Sequence
  LRRK2 RNA guide
caugaagucucaauguuacaa

SEQ ID NO: 92865 - RNA, 21 nt, Artificial Sequence
  LRRK2 RNA guide
cauugagacuucauguaaaac

SEQ ID NO: 92866 - RNA, 21 nt, Artificial Sequence
  LRRK2 RNA guide
ccuuuguaacauugagacuuc

SEQ ID NO: 92867 - RNA, 21 nt, Artificial Sequence
  LRRK2 RNA guide
cuuuguaacauugagacuuca

SEQ ID NO: 92868 - RNA, 21 nt, Artificial Sequence
  LRRK2 RNA guide
gaagucucaauguuacaaagg

SEQ ID NO: 92869 - RNA, 21 nt, Artificial Sequence
  LRRK2 RNA guide
guaacauugagacuucaugua

SEQ ID NO: 92870 - RNA, 21 nt, Artificial Sequence
  LRRK2 RNA guide
gucucaauguuacaaaggaac

SEQ ID NO: 92871 - RNA, 21 nt, Artificial Sequence
  LRRK2 RNA guide
guuccuuuguaacauugagac

SEQ ID NO: 92872 - RNA, 21 nt, Artificial Sequence
  LRRK2 RNA guide
guuuuacaugaagucucaaug

SEQ ID NO: 92873 - RNA, 21 nt, Artificial Sequence
  LRRK2 RNA guide
uacaugaagucucaauguuac

SEQ ID NO: 92874 - RNA, 21 nt, Artificial Sequence
  LRRK2 RNA guide
uccuuuguaacauugagacuu

SEQ ID NO: 92875 - RNA, 21 nt, Artificial Sequence
  LRRK2 RNA guide
ucucaauguuacaaaggaaca

SEQ ID NO: 92876 - RNA, 21 nt, Artificial Sequence
  LRRK2 RNA guide
ugaagucucaauguuacaaag

SEQ ID NO: 92877 - RNA, 21 nt, Artificial Sequence
  LRRK2 RNA guide
uguaacauugagacuucaugu

SEQ ID NO: 92878 - RNA, 21 nt, Artificial Sequence
  LRRK2 RNA guide
uguuccuuuguaacauugaga

SEQ ID NO: 92879 - RNA, 21 nt, Artificial Sequence
  LRRK2 RNA guide
uuccuuuguaacauugagacu

SEQ ID NO: 92880 - RNA, 21 nt, Artificial Sequence
  LRRK2 RNA guide
uuguaacauugagacuucaug

SEQ ID NO: 92881 - RNA, 22 nt, Artificial Sequence
  LRRK2 RNA guide
aagucucaauguuacaaaggaa

SEQ ID NO: 92882 - RNA, 22 nt, Artificial Sequence
  LRRK2 RNA guide
acaugaagucucaauguuacaa

SEQ ID NO: 92883 - RNA, 22 nt, Artificial Sequence
  LRRK2 RNA guide
acauugagacuucauguaaaac

SEQ ID NO: 92884 - RNA, 22 nt, Artificial Sequence
  LRRK2 RNA guide
agucucaauguuacaaaggaac

SEQ ID NO: 92885 - RNA, 22 nt, Artificial Sequence
  LRRK2 RNA guide
aguuuuacaugaagucucaaug

SEQ ID NO: 92886 - RNA, 22 nt, Artificial Sequence
  LRRK2 RNA guide
augaagucucaauguuacaaag

SEQ ID NO: 92887 - RNA, 22 nt, Artificial Sequence
  LRRK2 RNA guide
auguuccuuuguaacauugaga

SEQ ID NO: 92888 - RNA, 22 nt, Artificial Sequence
  LRRK2 RNA guide
caaaaguuuuacaugaagucuc

SEQ ID NO: 92889 - RNA, 22 nt, Artificial Sequence
  LRRK2 RNA guide
caugaagucucaauguuacaaa

SEQ ID NO: 92890 - RNA, 22 nt, Artificial Sequence
  LRRK2 RNA guide
cauugagacuucauguaaaacu

SEQ ID NO: 92891 - RNA, 22 nt, Artificial Sequence
  LRRK2 RNA guide
ccuuuguaacauugagacuuca

SEQ ID NO: 92892 - RNA, 22 nt, Artificial Sequence
  LRRK2 RNA guide
cuuuguaacauugagacuucau

SEQ ID NO: 92893 - RNA, 22 nt, Artificial Sequence
  LRRK2 RNA guide
gaagucucaauguuacaaagga

SEQ ID NO: 92894 - RNA, 22 nt, Artificial Sequence
  LRRK2 RNA guide
gagacuucauguaaaacuuuug

SEQ ID NO: 92895 - RNA, 22 nt, Artificial Sequence
  LRRK2 RNA guide
gagucaaaaguuuuacaugaag

SEQ ID NO: 92896 - RNA, 22 nt, Artificial Sequence
  LRRK2 RNA guide
guaacauugagacuucauguaa

SEQ ID NO: 92897 - RNA, 22 nt, Artificial Sequence
  LRRK2 RNA guide
gucaaaaguuuuacaugaaguc

SEQ ID NO: 92898 - RNA, 22 nt, Artificial Sequence
  LRRK2 RNA guide
gucucaauguuacaaaggaaca

SEQ ID NO: 92899 - RNA, 22 nt, Artificial Sequence
  LRRK2 RNA guide
guuccuuuguaacauugagacu

SEQ ID NO: 92900 - RNA, 22 nt, Artificial Sequence
  LRRK2 RNA guide
guuuuacaugaagucucaaugu

SEQ ID NO: 92901 - RNA, 22 nt, Artificial Sequence
  LRRK2 RNA guide
uacaugaagucucaauguuaca

SEQ ID NO: 92902 - RNA, 22 nt, Artificial Sequence
  LRRK2 RNA guide
uauguuccuuuguaacauugag

SEQ ID NO: 92903 - RNA, 22 nt, Artificial Sequence
  LRRK2 RNA guide
uccuuuguaacauugagacuuc

SEQ ID NO: 92904 - RNA, 22 nt, Artificial Sequence
  LRRK2 RNA guide
ucucaauguuacaaaggaacau

SEQ ID NO: 92905 - RNA, 22 nt, Artificial Sequence
  LRRK2 RNA guide
ugaagucucaauguuacaaagg

SEQ ID NO: 92906 - RNA, 22 nt, Artificial Sequence
  LRRK2 RNA guide
uguaacauugagacuucaugua

SEQ ID NO: 92907 - RNA, 22 nt, Artificial Sequence
  LRRK2 RNA guide
uguuccuuuguaacauugagac

SEQ ID NO: 92908 - RNA, 22 nt, Artificial Sequence
  LRRK2 RNA guide
uuacaugaagucucaauguuac

SEQ ID NO: 92909 - RNA, 22 nt, Artificial Sequence
  LRRK2 RNA guide
uuccuuuguaacauugagacuu

SEQ ID NO: 92910 - RNA, 22 nt, Artificial Sequence
  LRRK2 RNA guide
uuguaacauugagacuucaugu

SEQ ID NO: 92911 - RNA, 22 nt, Artificial Sequence
  LRRK2 RNA guide
uuuguaacauugagacuucaug

SEQ ID NO: 92912 - RNA, 20 nt, Artificial Sequence
  LRRK2 RNA guide
aaguuucaauguuacaaagg

SEQ ID NO: 92913 - RNA, 20 nt, Artificial Sequence
  LRRK2 RNA guide
acaugaaguuucaauguuac

SEQ ID NO: 92914 - RNA, 20 nt, Artificial Sequence
  LRRK2 RNA guide
aguuucaauguuacaaagga

SEQ ID NO: 92915 - RNA, 20 nt, Artificial Sequence
  LRRK2 RNA guide
caugaaguuucaauguuaca

SEQ ID NO: 92916 - RNA, 20 nt, Artificial Sequence
  LRRK2 RNA guide
ccuuuguaacauugaaacuu

SEQ ID NO: 92917 - RNA, 20 nt, Artificial Sequence
  LRRK2 RNA guide
cuuuguaacauugaaacuuc

SEQ ID NO: 92918 - RNA, 20 nt, Artificial Sequence
  LRRK2 RNA guide
gaaguuucaauguuacaaag

SEQ ID NO: 92919 - RNA, 20 nt, Artificial Sequence
  LRRK2 RNA guide
guaacauugaaacuucaugu

SEQ ID NO: 92920 - RNA, 20 nt, Artificial Sequence
  LRRK2 RNA guide
guuccuuuguaacauugaaa

SEQ ID NO: 92921 - RNA, 20 nt, Artificial Sequence
  LRRK2 RNA guide
guuucaauguuacaaaggaa

SEQ ID NO: 92922 - RNA, 20 nt, Artificial Sequence
  LRRK2 RNA guide
uccuuuguaacauugaaacu

SEQ ID NO: 92923 - RNA, 20 nt, Artificial Sequence
  LRRK2 RNA guide
uguaacauugaaacuucaug

SEQ ID NO: 92924 - RNA, 20 nt, Artificial Sequence
  LRRK2 RNA guide
uguuccuuuguaacauugaa

SEQ ID NO: 92925 - RNA, 20 nt, Artificial Sequence
  LRRK2 RNA guide
uuccuuuguaacauugaaac

SEQ ID NO: 92926 - RNA, 20 nt, Artificial Sequence
  LRRK2 RNA guide
uuucaauguuacaaaggaac

SEQ ID NO: 92927 - RNA, 21 nt, Artificial Sequence
  LRRK2 RNA guide
ccuuuguaacauugaaacuuc

SEQ ID NO: 92928 - RNA, 21 nt, Artificial Sequence
  LRRK2 RNA guide
gaaguuucaauguuacaaagg

SEQ ID NO: 92929 - RNA, 21 nt, Artificial Sequence
  LRRK2 RNA guide
guuccuuuguaacauugaaac

SEQ ID NO: 92930 - RNA, 21 nt, Artificial Sequence
  LRRK2 RNA guide
guuucaauguuacaaaggaac

SEQ ID NO: 92931 - RNA, 22 nt, Artificial Sequence
  LRRK2 RNA guide
aguuucaauguuacaaaggaac

SEQ ID NO: 92932 - RNA, 22 nt, Artificial Sequence
  LRRK2 RNA guide
ccuuuguaacauugaaacuuca

SEQ ID NO: 92933 - RNA, 22 nt, Artificial Sequence
  LRRK2 RNA guide
gaaguuucaauguuacaaagga

SEQ ID NO: 92934 - RNA, 22 nt, Artificial Sequence
  LRRK2 RNA guide
guuccuuuguaacauugaaacu

SEQ ID NO: 92935 - RNA, 22 nt, Artificial Sequence
  LRRK2 RNA guide
guuucaauguuacaaaggaaca

SEQ ID NO: 92936 - RNA, 22 nt, Artificial Sequence
  LRRK2 RNA guide
uccuuuguaacauugaaacuuc

SEQ ID NO: 92937 - RNA, 22 nt, Artificial Sequence
  LRRK2 RNA guide
ugaaguuucaauguuacaaagg

SEQ ID NO: 92938 - RNA, 22 nt, Artificial Sequence
  LRRK2 RNA guide
uguuccuuuguaacauugaaac

SEQ ID NO: 92939 - RNA, 20 nt, Artificial Sequence
  LRRK2 RNA guide
cauguaaaacuuuugacucu

SEQ ID NO: 92940 - RNA, 20 nt, Artificial Sequence
  LRRK2 RNA guide
guaaaacuuuugacucuaac

SEQ ID NO: 92941 - RNA, 20 nt, Artificial Sequence
  LRRK2 RNA guide
ucauguaaaacuuuugacuc

SEQ ID NO: 92942 - RNA, 20 nt, Artificial Sequence
  LRRK2 RNA guide
ugcccaggauaaagaaaaaa

SEQ ID NO: 92943 - RNA, 21 nt, Artificial Sequence
  LRRK2 RNA guide
gugcccaggauaaagaaaaaa

SEQ ID NO: 92944 - RNA, 22 nt, Artificial Sequence
  LRRK2 RNA guide
cuucauguaaaacuuuugacuc

SEQ ID NO: 92945 - RNA, 22 nt, Artificial Sequence
  LRRK2 RNA guide
ugugcccaggauaaagaaaaaa

SEQ ID NO: 92946 - RNA, 20 nt, Artificial Sequence
  LRRK2 RNA guide
aaugguaaaagaaaacaagg

SEQ ID NO: 92947 - RNA, 20 nt, Artificial Sequence
  LRRK2 RNA guide
accauuaccucccuagaacc

SEQ ID NO: 92948 - RNA, 20 nt, Artificial Sequence
  LRRK2 RNA guide
agggagguaaugguaaaaga

SEQ ID NO: 92949 - RNA, 20 nt, Artificial Sequence
  LRRK2 RNA guide
agguaaugguaaaagaaaac

SEQ ID NO: 92950 - RNA, 20 nt, Artificial Sequence
  LRRK2 RNA guide
augguaaaagaaaacaagga

SEQ ID NO: 92951 - RNA, 20 nt, Artificial Sequence
  LRRK2 RNA guide
augguucuagggagguaaug

SEQ ID NO: 92952 - RNA, 20 nt, Artificial Sequence
  LRRK2 RNA guide
auuccuuguuuucuuuuacc

SEQ ID NO: 92953 - RNA, 20 nt, Artificial Sequence
  LRRK2 RNA guide
cauuaccucccuagaaccau

SEQ ID NO: 92954 - RNA, 20 nt, Artificial Sequence
  LRRK2 RNA guide
ccauuaccucccuagaacca

SEQ ID NO: 92955 - RNA, 20 nt, Artificial Sequence
  LRRK2 RNA guide
cuagggagguaaugguaaaa

SEQ ID NO: 92956 - RNA, 20 nt, Artificial Sequence
  LRRK2 RNA guide
cuuuuaccauuaccucccua

SEQ ID NO: 92957 - RNA, 20 nt, Artificial Sequence
  LRRK2 RNA guide
gagguaaugguaaaagaaaa

SEQ ID NO: 92958 - RNA, 20 nt, Artificial Sequence
  LRRK2 RNA guide
gauuccuuguuuucuuuuac

SEQ ID NO: 92959 - RNA, 20 nt, Artificial Sequence
  LRRK2 RNA guide
ggagguaaugguaaaagaaa

SEQ ID NO: 92960 - RNA, 20 nt, Artificial Sequence
  LRRK2 RNA guide
gggagguaaugguaaaagaa

SEQ ID NO: 92961 - RNA, 20 nt, Artificial Sequence
  LRRK2 RNA guide
gguaaugguaaaagaaaaca

SEQ ID NO: 92962 - RNA, 20 nt, Artificial Sequence
  LRRK2 RNA guide
gguucuagggagguaauggu

SEQ ID NO: 92963 - RNA, 20 nt, Artificial Sequence
  LRRK2 RNA guide
guucuagggagguaauggua

SEQ ID NO: 92964 - RNA, 20 nt, Artificial Sequence
  LRRK2 RNA guide
uaccauuaccucccuagaac

SEQ ID NO: 92965 - RNA, 20 nt, Artificial Sequence
  LRRK2 RNA guide
uagggagguaaugguaaaag

SEQ ID NO: 92966 - RNA, 20 nt, Artificial Sequence
  LRRK2 RNA guide
uaugguucuagggagguaau

SEQ ID NO: 92967 - RNA, 20 nt, Artificial Sequence
  LRRK2 RNA guide
uccuuguuuucuuuuaccau

SEQ ID NO: 92968 - RNA, 20 nt, Artificial Sequence
  LRRK2 RNA guide
ucuagggagguaaugguaaa

SEQ ID NO: 92969 - RNA, 20 nt, Artificial Sequence
  LRRK2 RNA guide
ucuuuuaccauuaccucccu

SEQ ID NO: 92970 - RNA, 20 nt, Artificial Sequence
  LRRK2 RNA guide
ugguucuagggagguaaugg

SEQ ID NO: 92971 - RNA, 20 nt, Artificial Sequence
  LRRK2 RNA guide
uuaccauuaccucccuagaa

SEQ ID NO: 92972 - RNA, 20 nt, Artificial Sequence
  LRRK2 RNA guide
uuaugguucuagggagguaa

SEQ ID NO: 92973 - RNA, 20 nt, Artificial Sequence
  LRRK2 RNA guide
uuccuuguuuucuuuuacca

SEQ ID NO: 92974 - RNA, 20 nt, Artificial Sequence
  LRRK2 RNA guide
uucuagggagguaaugguaa

SEQ ID NO: 92975 - RNA, 20 nt, Artificial Sequence
  LRRK2 RNA guide
uucuuuuaccauuaccuccc

SEQ ID NO: 92976 - RNA, 20 nt, Artificial Sequence
  LRRK2 RNA guide
uuuaugguucuagggaggua

SEQ ID NO: 92977 - RNA, 20 nt, Artificial Sequence
  LRRK2 RNA guide
uuucuuuuaccauuaccucc

SEQ ID NO: 92978 - RNA, 20 nt, Artificial Sequence
  LRRK2 RNA guide
uuuuaccauuaccucccuag

SEQ ID NO: 92979 - RNA, 20 nt, Artificial Sequence
  LRRK2 RNA guide
uuuucuuuuaccauuaccuc

SEQ ID NO: 92980 - RNA, 21 nt, Artificial Sequence
  LRRK2 RNA guide
accauuaccucccuagaacca

SEQ ID NO: 92981 - RNA, 21 nt, Artificial Sequence
  LRRK2 RNA guide
agggagguaaugguaaaagaa

SEQ ID NO: 92982 - RNA, 21 nt, Artificial Sequence
  LRRK2 RNA guide
augguucuagggagguaaugg

SEQ ID NO: 92983 - RNA, 21 nt, Artificial Sequence
  LRRK2 RNA guide
cauuaccucccuagaaccaua

SEQ ID NO: 92984 - RNA, 21 nt, Artificial Sequence
  LRRK2 RNA guide
ccauuaccucccuagaaccau

SEQ ID NO: 92985 - RNA, 21 nt, Artificial Sequence
  LRRK2 RNA guide
cuagggagguaaugguaaaag

SEQ ID NO: 92986 - RNA, 21 nt, Artificial Sequence
  LRRK2 RNA guide
cuuuaugguucuagggaggua

SEQ ID NO: 92987 - RNA, 21 nt, Artificial Sequence
  LRRK2 RNA guide
cuuuuaccauuaccucccuag

SEQ ID NO: 92988 - RNA, 21 nt, Artificial Sequence
  LRRK2 RNA guide
gagguaaugguaaaagaaaac

SEQ ID NO: 92989 - RNA, 21 nt, Artificial Sequence
  LRRK2 RNA guide
gauuccuuguuuucuuuuacc

SEQ ID NO: 92990 - RNA, 21 nt, Artificial Sequence
  LRRK2 RNA guide
ggagguaaugguaaaagaaaa

SEQ ID NO: 92991 - RNA, 21 nt, Artificial Sequence
  LRRK2 RNA guide
gggagguaaugguaaaagaaa

SEQ ID NO: 92992 - RNA, 21 nt, Artificial Sequence
  LRRK2 RNA guide
gguucuagggagguaauggua

SEQ ID NO: 92993 - RNA, 21 nt, Artificial Sequence
  LRRK2 RNA guide
guucuagggagguaaugguaa

SEQ ID NO: 92994 - RNA, 21 nt, Artificial Sequence
  LRRK2 RNA guide
guuuucuuuuaccauuaccuc

SEQ ID NO: 92995 - RNA, 21 nt, Artificial Sequence
  LRRK2 RNA guide
uaccauuaccucccuagaacc

SEQ ID NO: 92996 - RNA, 21 nt, Artificial Sequence
  LRRK2 RNA guide
uagggagguaaugguaaaaga

SEQ ID NO: 92997 - RNA, 21 nt, Artificial Sequence
  LRRK2 RNA guide
uaugguucuagggagguaaug

SEQ ID NO: 92998 - RNA, 21 nt, Artificial Sequence
  LRRK2 RNA guide
ucuagggagguaaugguaaaa

SEQ ID NO: 92999 - RNA, 21 nt, Artificial Sequence
  LRRK2 RNA guide
ucuuuuaccauuaccucccua

SEQ ID NO: 93000 - RNA, 21 nt, Artificial Sequence
  LRRK2 RNA guide
ugguucuagggagguaauggu

SEQ ID NO: 93001 - RNA, 21 nt, Artificial Sequence
  LRRK2 RNA guide
uuaccauuaccucccuagaac

SEQ ID NO: 93002 - RNA, 21 nt, Artificial Sequence
  LRRK2 RNA guide
uuaugguucuagggagguaau

SEQ ID NO: 93003 - RNA, 21 nt, Artificial Sequence
  LRRK2 RNA guide
uucuagggagguaaugguaaa

SEQ ID NO: 93004 - RNA, 21 nt, Artificial Sequence
  LRRK2 RNA guide
uucuuuuaccauuaccucccu

SEQ ID NO: 93005 - RNA, 21 nt, Artificial Sequence
  LRRK2 RNA guide
uuuaccauuaccucccuagaa

SEQ ID NO: 93006 - RNA, 21 nt, Artificial Sequence
  LRRK2 RNA guide
uuuaugguucuagggagguaa

SEQ ID NO: 93007 - RNA, 21 nt, Artificial Sequence
  LRRK2 RNA guide
uuucuuuuaccauuaccuccc

SEQ ID NO: 93008 - RNA, 21 nt, Artificial Sequence
  LRRK2 RNA guide
uuuuaccauuaccucccuaga

SEQ ID NO: 93009 - RNA, 21 nt, Artificial Sequence
  LRRK2 RNA guide
uuuucuuuuaccauuaccucc

SEQ ID NO: 93010 - RNA, 22 nt, Artificial Sequence
  LRRK2 RNA guide
accauuaccucccuagaaccau

SEQ ID NO: 93011 - RNA, 22 nt, Artificial Sequence
  LRRK2 RNA guide
acuuuaugguucuagggaggua

SEQ ID NO: 93012 - RNA, 22 nt, Artificial Sequence
  LRRK2 RNA guide
agggagguaaugguaaaagaaa

SEQ ID NO: 93013 - RNA, 22 nt, Artificial Sequence
  LRRK2 RNA guide
augguucuagggagguaauggu

SEQ ID NO: 93014 - RNA, 22 nt, Artificial Sequence
  LRRK2 RNA guide
cauuaccucccuagaaccauaa

SEQ ID NO: 93015 - RNA, 22 nt, Artificial Sequence
  LRRK2 RNA guide
ccauuaccucccuagaaccaua

SEQ ID NO: 93016 - RNA, 22 nt, Artificial Sequence
  LRRK2 RNA guide
cuagggagguaaugguaaaaga

SEQ ID NO: 93017 - RNA, 22 nt, Artificial Sequence
  LRRK2 RNA guide
cuuuaugguucuagggagguaa

SEQ ID NO: 93018 - RNA, 22 nt, Artificial Sequence
  LRRK2 RNA guide
cuuuuaccauuaccucccuaga

SEQ ID NO: 93019 - RNA, 22 nt, Artificial Sequence
  LRRK2 RNA guide
gagguaaugguaaaagaaaaca

SEQ ID NO: 93020 - RNA, 22 nt, Artificial Sequence
  LRRK2 RNA guide
gauuccuuguuuucuuuuacca

SEQ ID NO: 93021 - RNA, 22 nt, Artificial Sequence
  LRRK2 RNA guide
ggagguaaugguaaaagaaaac

SEQ ID NO: 93022 - RNA, 22 nt, Artificial Sequence
  LRRK2 RNA guide
gggagguaaugguaaaagaaaa

SEQ ID NO: 93023 - RNA, 22 nt, Artificial Sequence
  LRRK2 RNA guide
gguaaugguaaaagaaaacaag

SEQ ID NO: 93024 - RNA, 22 nt, Artificial Sequence
  LRRK2 RNA guide
gguucuagggagguaaugguaa

SEQ ID NO: 93025 - RNA, 22 nt, Artificial Sequence
  LRRK2 RNA guide
guaaugguaaaagaaaacaagg

SEQ ID NO: 93026 - RNA, 22 nt, Artificial Sequence
  LRRK2 RNA guide
guucuagggagguaaugguaaa

SEQ ID NO: 93027 - RNA, 22 nt, Artificial Sequence
  LRRK2 RNA guide
guuuucuuuuaccauuaccucc

SEQ ID NO: 93028 - RNA, 22 nt, Artificial Sequence
  LRRK2 RNA guide
uaccauuaccucccuagaacca

SEQ ID NO: 93029 - RNA, 22 nt, Artificial Sequence
  LRRK2 RNA guide
uagggagguaaugguaaaagaa

SEQ ID NO: 93030 - RNA, 22 nt, Artificial Sequence
  LRRK2 RNA guide
uaugguucuagggagguaaugg

SEQ ID NO: 93031 - RNA, 22 nt, Artificial Sequence
  LRRK2 RNA guide
ucuagggagguaaugguaaaag

SEQ ID NO: 93032 - RNA, 22 nt, Artificial Sequence
  LRRK2 RNA guide
ucuuuuaccauuaccucccuag

SEQ ID NO: 93033 - RNA, 22 nt, Artificial Sequence
  LRRK2 RNA guide
ugauuccuuguuuucuuuuacc

SEQ ID NO: 93034 - RNA, 22 nt, Artificial Sequence
  LRRK2 RNA guide
ugguucuagggagguaauggua

SEQ ID NO: 93035 - RNA, 22 nt, Artificial Sequence
  LRRK2 RNA guide
uguuuucuuuuaccauuaccuc

SEQ ID NO: 93036 - RNA, 22 nt, Artificial Sequence
  LRRK2 RNA guide
uuaccauuaccucccuagaacc

SEQ ID NO: 93037 - RNA, 22 nt, Artificial Sequence
  LRRK2 RNA guide
uuaugguucuagggagguaaug

SEQ ID NO: 93038 - RNA, 22 nt, Artificial Sequence
  LRRK2 RNA guide
uucuagggagguaaugguaaaa

SEQ ID NO: 93039 - RNA, 22 nt, Artificial Sequence
  LRRK2 RNA guide
uucuuuuaccauuaccucccua

SEQ ID NO: 93040 - RNA, 22 nt, Artificial Sequence
  LRRK2 RNA guide
uuuaccauuaccucccuagaac

SEQ ID NO: 93041 - RNA, 22 nt, Artificial Sequence
  LRRK2 RNA guide
uuuaugguucuagggagguaau

SEQ ID NO: 93042 - RNA, 22 nt, Artificial Sequence
  LRRK2 RNA guide
uuucuuuuaccauuaccucccu

SEQ ID NO: 93043 - RNA, 22 nt, Artificial Sequence
  LRRK2 RNA guide
uuuuaccauuaccucccuagaa

SEQ ID NO: 93044 - RNA, 22 nt, Artificial Sequence
  LRRK2 RNA guide
uuuucuuuuaccauuaccuccc

SEQ ID NO: 93045 - RNA, 20 nt, Artificial Sequence
  LRRK2 RNA guide
aacgguaaaagaaaacaagg

SEQ ID NO: 93046 - RNA, 20 nt, Artificial Sequence
  LRRK2 RNA guide
accguuaccucccuagaacc

SEQ ID NO: 93047 - RNA, 20 nt, Artificial Sequence
  LRRK2 RNA guide
acgguaaaagaaaacaagga

SEQ ID NO: 93048 - RNA, 20 nt, Artificial Sequence
  LRRK2 RNA guide
agggagguaacgguaaaaga

SEQ ID NO: 93049 - RNA, 20 nt, Artificial Sequence
  LRRK2 RNA guide
agguaacgguaaaagaaaac

SEQ ID NO: 93050 - RNA, 20 nt, Artificial Sequence
  LRRK2 RNA guide
augguucuagggagguaacg

SEQ ID NO: 93051 - RNA, 20 nt, Artificial Sequence
  LRRK2 RNA guide
ccguuaccucccuagaacca

SEQ ID NO: 93052 - RNA, 20 nt, Artificial Sequence
  LRRK2 RNA guide
ccuuguuuucuuuuaccguu

SEQ ID NO: 93053 - RNA, 20 nt, Artificial Sequence
  LRRK2 RNA guide
cguuaccucccuagaaccau

SEQ ID NO: 93054 - RNA, 20 nt, Artificial Sequence
  LRRK2 RNA guide
cuagggagguaacgguaaaa

SEQ ID NO: 93055 - RNA, 20 nt, Artificial Sequence
  LRRK2 RNA guide
cuuguuuucuuuuaccguua

SEQ ID NO: 93056 - RNA, 20 nt, Artificial Sequence
  LRRK2 RNA guide
cuuuuaccguuaccucccua

SEQ ID NO: 93057 - RNA, 20 nt, Artificial Sequence
  LRRK2 RNA guide
gagguaacgguaaaagaaaa

SEQ ID NO: 93058 - RNA, 20 nt, Artificial Sequence
  LRRK2 RNA guide
ggagguaacgguaaaagaaa

SEQ ID NO: 93059 - RNA, 20 nt, Artificial Sequence
  LRRK2 RNA guide
gggagguaacgguaaaagaa

SEQ ID NO: 93060 - RNA, 20 nt, Artificial Sequence
  LRRK2 RNA guide
gguaacgguaaaagaaaaca

SEQ ID NO: 93061 - RNA, 20 nt, Artificial Sequence
  LRRK2 RNA guide
gguucuagggagguaacggu

SEQ ID NO: 93062 - RNA, 20 nt, Artificial Sequence
  LRRK2 RNA guide
guaacgguaaaagaaaacaa

SEQ ID NO: 93063 - RNA, 20 nt, Artificial Sequence
  LRRK2 RNA guide
guucuagggagguaacggua

SEQ ID NO: 93064 - RNA, 20 nt, Artificial Sequence
  LRRK2 RNA guide
guuuucuuuuaccguuaccu

SEQ ID NO: 93065 - RNA, 20 nt, Artificial Sequence
  LRRK2 RNA guide
uaacgguaaaagaaaacaag

SEQ ID NO: 93066 - RNA, 20 nt, Artificial Sequence
  LRRK2 RNA guide
uaccguuaccucccuagaac

SEQ ID NO: 93067 - RNA, 20 nt, Artificial Sequence
  LRRK2 RNA guide
uagggagguaacgguaaaag

SEQ ID NO: 93068 - RNA, 20 nt, Artificial Sequence
  LRRK2 RNA guide
uaugguucuagggagguaac

SEQ ID NO: 93069 - RNA, 20 nt, Artificial Sequence
  LRRK2 RNA guide
uccuuguuuucuuuuaccgu

SEQ ID NO: 93070 - RNA, 20 nt, Artificial Sequence
  LRRK2 RNA guide
ucuagggagguaacgguaaa

SEQ ID NO: 93071 - RNA, 20 nt, Artificial Sequence
  LRRK2 RNA guide
ucuuuuaccguuaccucccu

SEQ ID NO: 93072 - RNA, 20 nt, Artificial Sequence
  LRRK2 RNA guide
ugguucuagggagguaacgg

SEQ ID NO: 93073 - RNA, 20 nt, Artificial Sequence
  LRRK2 RNA guide
uguuuucuuuuaccguuacc

SEQ ID NO: 93074 - RNA, 20 nt, Artificial Sequence
  LRRK2 RNA guide
uuaccguuaccucccuagaa

SEQ ID NO: 93075 - RNA, 20 nt, Artificial Sequence
  LRRK2 RNA guide
uuccuuguuuucuuuuaccg

SEQ ID NO: 93076 - RNA, 20 nt, Artificial Sequence
  LRRK2 RNA guide
uucuagggagguaacgguaa

SEQ ID NO: 93077 - RNA, 20 nt, Artificial Sequence
  LRRK2 RNA guide
uucuuuuaccguuaccuccc

SEQ ID NO: 93078 - RNA, 20 nt, Artificial Sequence
  LRRK2 RNA guide
uuguuuucuuuuaccguuac

SEQ ID NO: 93079 - RNA, 20 nt, Artificial Sequence
  LRRK2 RNA guide
uuuaccguuaccucccuaga

SEQ ID NO: 93080 - RNA, 20 nt, Artificial Sequence
  LRRK2 RNA guide
uuucuuuuaccguuaccucc

SEQ ID NO: 93081 - RNA, 20 nt, Artificial Sequence
  LRRK2 RNA guide
uuuuaccguuaccucccuag

SEQ ID NO: 93082 - RNA, 20 nt, Artificial Sequence
  LRRK2 RNA guide
uuuucuuuuaccguuaccuc

SEQ ID NO: 93083 - RNA, 21 nt, Artificial Sequence
  LRRK2 RNA guide
aacgguaaaagaaaacaagga

SEQ ID NO: 93084 - RNA, 21 nt, Artificial Sequence
  LRRK2 RNA guide
accguuaccucccuagaacca

SEQ ID NO: 93085 - RNA, 21 nt, Artificial Sequence
  LRRK2 RNA guide
acgguaaaagaaaacaaggaa

SEQ ID NO: 93086 - RNA, 21 nt, Artificial Sequence
  LRRK2 RNA guide
agggagguaacgguaaaagaa

SEQ ID NO: 93087 - RNA, 21 nt, Artificial Sequence
  LRRK2 RNA guide
agguaacgguaaaagaaaaca

SEQ ID NO: 93088 - RNA, 21 nt, Artificial Sequence
  LRRK2 RNA guide
augguucuagggagguaacgg

SEQ ID NO: 93089 - RNA, 21 nt, Artificial Sequence
  LRRK2 RNA guide
auuccuuguuuucuuuuaccg

SEQ ID NO: 93090 - RNA, 21 nt, Artificial Sequence
  LRRK2 RNA guide
ccguuaccucccuagaaccau

SEQ ID NO: 93091 - RNA, 21 nt, Artificial Sequence
  LRRK2 RNA guide
ccuuguuuucuuuuaccguua

SEQ ID NO: 93092 - RNA, 21 nt, Artificial Sequence
  LRRK2 RNA guide
cguuaccucccuagaaccaua

SEQ ID NO: 93093 - RNA, 21 nt, Artificial Sequence
  LRRK2 RNA guide
cuagggagguaacgguaaaag

SEQ ID NO: 93094 - RNA, 21 nt, Artificial Sequence
  LRRK2 RNA guide
cuuguuuucuuuuaccguuac

SEQ ID NO: 93095 - RNA, 21 nt, Artificial Sequence
  LRRK2 RNA guide
cuuuuaccguuaccucccuag

SEQ ID NO: 93096 - RNA, 21 nt, Artificial Sequence
  LRRK2 RNA guide
gagguaacgguaaaagaaaac

SEQ ID NO: 93097 - RNA, 21 nt, Artificial Sequence
  LRRK2 RNA guide
ggagguaacgguaaaagaaaa

SEQ ID NO: 93098 - RNA, 21 nt, Artificial Sequence
  LRRK2 RNA guide
gggagguaacgguaaaagaaa

SEQ ID NO: 93099 - RNA, 21 nt, Artificial Sequence
  LRRK2 RNA guide
gguaacgguaaaagaaaacaa

SEQ ID NO: 93100 - RNA, 21 nt, Artificial Sequence
  LRRK2 RNA guide
gguucuagggagguaacggua

SEQ ID NO: 93101 - RNA, 21 nt, Artificial Sequence
  LRRK2 RNA guide
guaacgguaaaagaaaacaag

SEQ ID NO: 93102 - RNA, 21 nt, Artificial Sequence
  LRRK2 RNA guide
guucuagggagguaacgguaa

SEQ ID NO: 93103 - RNA, 21 nt, Artificial Sequence
  LRRK2 RNA guide
guuuucuuuuaccguuaccuc

SEQ ID NO: 93104 - RNA, 21 nt, Artificial Sequence
  LRRK2 RNA guide
uaacgguaaaagaaaacaagg

SEQ ID NO: 93105 - RNA, 21 nt, Artificial Sequence
  LRRK2 RNA guide
uaccguuaccucccuagaacc

SEQ ID NO: 93106 - RNA, 21 nt, Artificial Sequence
  LRRK2 RNA guide
uagggagguaacgguaaaaga

SEQ ID NO: 93107 - RNA, 21 nt, Artificial Sequence
  LRRK2 RNA guide
uaugguucuagggagguaacg

SEQ ID NO: 93108 - RNA, 21 nt, Artificial Sequence
  LRRK2 RNA guide
uccuuguuuucuuuuaccguu

SEQ ID NO: 93109 - RNA, 21 nt, Artificial Sequence
  LRRK2 RNA guide
ucuagggagguaacgguaaaa

SEQ ID NO: 93110 - RNA, 21 nt, Artificial Sequence
  LRRK2 RNA guide
ucuuuuaccguuaccucccua

SEQ ID NO: 93111 - RNA, 21 nt, Artificial Sequence
  LRRK2 RNA guide
ugguucuagggagguaacggu

SEQ ID NO: 93112 - RNA, 21 nt, Artificial Sequence
  LRRK2 RNA guide
uguuuucuuuuaccguuaccu

SEQ ID NO: 93113 - RNA, 21 nt, Artificial Sequence
  LRRK2 RNA guide
uuaccguuaccucccuagaac

SEQ ID NO: 93114 - RNA, 21 nt, Artificial Sequence
  LRRK2 RNA guide
uuaugguucuagggagguaac

SEQ ID NO: 93115 - RNA, 21 nt, Artificial Sequence
  LRRK2 RNA guide
uuccuuguuuucuuuuaccgu

SEQ ID NO: 93116 - RNA, 21 nt, Artificial Sequence
  LRRK2 RNA guide
uucuagggagguaacgguaaa

SEQ ID NO: 93117 - RNA, 21 nt, Artificial Sequence
  LRRK2 RNA guide
uucuuuuaccguuaccucccu

SEQ ID NO: 93118 - RNA, 21 nt, Artificial Sequence
  LRRK2 RNA guide
uuguuuucuuuuaccguuacc

SEQ ID NO: 93119 - RNA, 21 nt, Artificial Sequence
  LRRK2 RNA guide
uuuaccguuaccucccuagaa

SEQ ID NO: 93120 - RNA, 21 nt, Artificial Sequence
  LRRK2 RNA guide
uuucuuuuaccguuaccuccc

SEQ ID NO: 93121 - RNA, 21 nt, Artificial Sequence
  LRRK2 RNA guide
uuuuaccguuaccucccuaga

SEQ ID NO: 93122 - RNA, 21 nt, Artificial Sequence
  LRRK2 RNA guide
uuuucuuuuaccguuaccucc

SEQ ID NO: 93123 - RNA, 22 nt, Artificial Sequence
  LRRK2 RNA guide
aacgguaaaagaaaacaaggaa

SEQ ID NO: 93124 - RNA, 22 nt, Artificial Sequence
  LRRK2 RNA guide
accguuaccucccuagaaccau

SEQ ID NO: 93125 - RNA, 22 nt, Artificial Sequence
  LRRK2 RNA guide
acgguaaaagaaaacaaggaau

SEQ ID NO: 93126 - RNA, 22 nt, Artificial Sequence
  LRRK2 RNA guide
agggagguaacgguaaaagaaa

SEQ ID NO: 93127 - RNA, 22 nt, Artificial Sequence
  LRRK2 RNA guide
agguaacgguaaaagaaaacaa

SEQ ID NO: 93128 - RNA, 22 nt, Artificial Sequence
  LRRK2 RNA guide
augguucuagggagguaacggu

SEQ ID NO: 93129 - RNA, 22 nt, Artificial Sequence
  LRRK2 RNA guide
auuccuuguuuucuuuuaccgu

SEQ ID NO: 93130 - RNA, 22 nt, Artificial Sequence
  LRRK2 RNA guide
ccguuaccucccuagaaccaua

SEQ ID NO: 93131 - RNA, 22 nt, Artificial Sequence
  LRRK2 RNA guide
ccuuguuuucuuuuaccguuac

SEQ ID NO: 93132 - RNA, 22 nt, Artificial Sequence
  LRRK2 RNA guide
cguuaccucccuagaaccauaa

SEQ ID NO: 93133 - RNA, 22 nt, Artificial Sequence
  LRRK2 RNA guide
cuagggagguaacgguaaaaga

SEQ ID NO: 93134 - RNA, 22 nt, Artificial Sequence
  LRRK2 RNA guide
cuuguuuucuuuuaccguuacc

SEQ ID NO: 93135 - RNA, 22 nt, Artificial Sequence
  LRRK2 RNA guide
cuuuuaccguuaccucccuaga

SEQ ID NO: 93136 - RNA, 22 nt, Artificial Sequence
  LRRK2 RNA guide
gagguaacgguaaaagaaaaca

SEQ ID NO: 93137 - RNA, 22 nt, Artificial Sequence
  LRRK2 RNA guide
gauuccuuguuuucuuuuaccg

SEQ ID NO: 93138 - RNA, 22 nt, Artificial Sequence
  LRRK2 RNA guide
ggagguaacgguaaaagaaaac

SEQ ID NO: 93139 - RNA, 22 nt, Artificial Sequence
  LRRK2 RNA guide
gggagguaacgguaaaagaaaa

SEQ ID NO: 93140 - RNA, 22 nt, Artificial Sequence
  LRRK2 RNA guide
gguaacgguaaaagaaaacaag

SEQ ID NO: 93141 - RNA, 22 nt, Artificial Sequence
  LRRK2 RNA guide
gguucuagggagguaacgguaa

SEQ ID NO: 93142 - RNA, 22 nt, Artificial Sequence
  LRRK2 RNA guide
guaacgguaaaagaaaacaagg

SEQ ID NO: 93143 - RNA, 22 nt, Artificial Sequence
  LRRK2 RNA guide
guucuagggagguaacgguaaa

SEQ ID NO: 93144 - RNA, 22 nt, Artificial Sequence
  LRRK2 RNA guide
guuuucuuuuaccguuaccucc

SEQ ID NO: 93145 - RNA, 22 nt, Artificial Sequence
  LRRK2 RNA guide
uaacgguaaaagaaaacaagga

SEQ ID NO: 93146 - RNA, 22 nt, Artificial Sequence
  LRRK2 RNA guide
uaccguuaccucccuagaacca

SEQ ID NO: 93147 - RNA, 22 nt, Artificial Sequence
  LRRK2 RNA guide
uagggagguaacgguaaaagaa

SEQ ID NO: 93148 - RNA, 22 nt, Artificial Sequence
  LRRK2 RNA guide
uaugguucuagggagguaacgg

SEQ ID NO: 93149 - RNA, 22 nt, Artificial Sequence
  LRRK2 RNA guide
uccuuguuuucuuuuaccguua

SEQ ID NO: 93150 - RNA, 22 nt, Artificial Sequence
  LRRK2 RNA guide
ucuagggagguaacgguaaaag

SEQ ID NO: 93151 - RNA, 22 nt, Artificial Sequence
  LRRK2 RNA guide
ucuuuuaccguuaccucccuag

SEQ ID NO: 93152 - RNA, 22 nt, Artificial Sequence
  LRRK2 RNA guide
ugguucuagggagguaacggua

SEQ ID NO: 93153 - RNA, 22 nt, Artificial Sequence
  LRRK2 RNA guide
uguuuucuuuuaccguuaccuc

SEQ ID NO: 93154 - RNA, 22 nt, Artificial Sequence
  LRRK2 RNA guide
uuaccguuaccucccuagaacc

SEQ ID NO: 93155 - RNA, 22 nt, Artificial Sequence
  LRRK2 RNA guide
uuaugguucuagggagguaacg

SEQ ID NO: 93156 - RNA, 22 nt, Artificial Sequence
  LRRK2 RNA guide
uuccuuguuuucuuuuaccguu

SEQ ID NO: 93157 - RNA, 22 nt, Artificial Sequence
  LRRK2 RNA guide
uucuagggagguaacgguaaaa

SEQ ID NO: 93158 - RNA, 22 nt, Artificial Sequence
  LRRK2 RNA guide
uucuuuuaccguuaccucccua

SEQ ID NO: 93159 - RNA, 22 nt, Artificial Sequence
  LRRK2 RNA guide
uuguuuucuuuuaccguuaccu

SEQ ID NO: 93160 - RNA, 22 nt, Artificial Sequence
  LRRK2 RNA guide
uuuaccguuaccucccuagaac

SEQ ID NO: 93161 - RNA, 22 nt, Artificial Sequence
  LRRK2 RNA guide
uuuaugguucuagggagguaac

SEQ ID NO: 93162 - RNA, 22 nt, Artificial Sequence
  LRRK2 RNA guide
uuucuuuuaccguuaccucccu

SEQ ID NO: 93163 - RNA, 22 nt, Artificial Sequence
  LRRK2 RNA guide
uuuuaccguuaccucccuagaa

SEQ ID NO: 93164 - RNA, 22 nt, Artificial Sequence
  LRRK2 RNA guide
uuuucuuuuaccguuaccuccc

SEQ ID NO: 93165 - RNA, 20 nt, Artificial Sequence
  LRRK2 RNA guide
aaaaacacauguuccucuuu

SEQ ID NO: 93166 - RNA, 20 nt, Artificial Sequence
  LRRK2 RNA guide
aaaacacauguuccucuuuc

SEQ ID NO: 93167 - RNA, 20 nt, Artificial Sequence
  LRRK2 RNA guide
aaacacauguuccucuuuca

SEQ ID NO: 93168 - RNA, 20 nt, Artificial Sequence
  LRRK2 RNA guide
aaagaggaacauguguuuuu

SEQ ID NO: 93169 - RNA, 20 nt, Artificial Sequence
  LRRK2 RNA guide
aacacauguuccucuuucac

SEQ ID NO: 93170 - RNA, 20 nt, Artificial Sequence
  LRRK2 RNA guide
aagaggaacauguguuuuuc

SEQ ID NO: 93171 - RNA, 20 nt, Artificial Sequence
  LRRK2 RNA guide
aaguauaugugaaagaggaa

SEQ ID NO: 93172 - RNA, 20 nt, Artificial Sequence
  LRRK2 RNA guide
acacauguuccucuuucaca

SEQ ID NO: 93173 - RNA, 20 nt, Artificial Sequence
  LRRK2 RNA guide
acauguuccucuuucacaua

SEQ ID NO: 93174 - RNA, 20 nt, Artificial Sequence
  LRRK2 RNA guide
agaaaaacacauguuccucu

SEQ ID NO: 93175 - RNA, 20 nt, Artificial Sequence
  LRRK2 RNA guide
agaggaacauguguuuuucu

SEQ ID NO: 93176 - RNA, 20 nt, Artificial Sequence
  LRRK2 RNA guide
aguauaugugaaagaggaac

SEQ ID NO: 93177 - RNA, 20 nt, Artificial Sequence
  LRRK2 RNA guide
auaugugaaagaggaacaug

SEQ ID NO: 93178 - RNA, 20 nt, Artificial Sequence
  LRRK2 RNA guide
augugaaagaggaacaugug

SEQ ID NO: 93179 - RNA, 20 nt, Artificial Sequence
  LRRK2 RNA guide
auguuccucuuucacauaua

SEQ ID NO: 93180 - RNA, 20 nt, Artificial Sequence
  LRRK2 RNA guide
auucauugcaaguauaugug

SEQ ID NO: 93181 - RNA, 20 nt, Artificial Sequence
  LRRK2 RNA guide
auugcaaguauaugugaaag

SEQ ID NO: 93182 - RNA, 20 nt, Artificial Sequence
  LRRK2 RNA guide
caaguauaugugaaagagga

SEQ ID NO: 93183 - RNA, 20 nt, Artificial Sequence
  LRRK2 RNA guide
cacauguuccucuuucacau

SEQ ID NO: 93184 - RNA, 20 nt, Artificial Sequence
  LRRK2 RNA guide
cauguuccucuuucacauau

SEQ ID NO: 93185 - RNA, 20 nt, Artificial Sequence
  LRRK2 RNA guide
cauugcaaguauaugugaaa

SEQ ID NO: 93186 - RNA, 20 nt, Artificial Sequence
  LRRK2 RNA guide
ccucuuucacauauacuugc

SEQ ID NO: 93187 - RNA, 20 nt, Artificial Sequence
  LRRK2 RNA guide
cuagaaaaacacauguuccu

SEQ ID NO: 93188 - RNA, 20 nt, Artificial Sequence
  LRRK2 RNA guide
cucuuucacauauacuugca

SEQ ID NO: 93189 - RNA, 20 nt, Artificial Sequence
  LRRK2 RNA guide
gaaaaacacauguuccucuu

SEQ ID NO: 93190 - RNA, 20 nt, Artificial Sequence
  LRRK2 RNA guide
gaaagaggaacauguguuuu

SEQ ID NO: 93191 - RNA, 20 nt, Artificial Sequence
  LRRK2 RNA guide
gcaaguauaugugaaagagg

SEQ ID NO: 93192 - RNA, 20 nt, Artificial Sequence
  LRRK2 RNA guide
gcuagaaaaacacauguucc

SEQ ID NO: 93193 - RNA, 20 nt, Artificial Sequence
  LRRK2 RNA guide
ggugcuagaaaaacacaugu

SEQ ID NO: 93194 - RNA, 20 nt, Artificial Sequence
  LRRK2 RNA guide
guauaugugaaagaggaaca

SEQ ID NO: 93195 - RNA, 20 nt, Artificial Sequence
  LRRK2 RNA guide
gugaaagaggaacauguguu

SEQ ID NO: 93196 - RNA, 20 nt, Artificial Sequence
  LRRK2 RNA guide
gugcuagaaaaacacauguu

SEQ ID NO: 93197 - RNA, 20 nt, Artificial Sequence
  LRRK2 RNA guide
guuccucuuucacauauacu

SEQ ID NO: 93198 - RNA, 20 nt, Artificial Sequence
  LRRK2 RNA guide
uagaaaaacacauguuccuc

SEQ ID NO: 93199 - RNA, 20 nt, Artificial Sequence
  LRRK2 RNA guide
uauaugugaaagaggaacau

SEQ ID NO: 93200 - RNA, 20 nt, Artificial Sequence
  LRRK2 RNA guide
uaugugaaagaggaacaugu

SEQ ID NO: 93201 - RNA, 20 nt, Artificial Sequence
  LRRK2 RNA guide
ucauugcaaguauaugugaa

SEQ ID NO: 93202 - RNA, 20 nt, Artificial Sequence
  LRRK2 RNA guide
uccucuuucacauauacuug

SEQ ID NO: 93203 - RNA, 20 nt, Artificial Sequence
  LRRK2 RNA guide
ucuuucacauauacuugcaa

SEQ ID NO: 93204 - RNA, 20 nt, Artificial Sequence
  LRRK2 RNA guide
ugaaagaggaacauguguuu

SEQ ID NO: 93205 - RNA, 20 nt, Artificial Sequence
  LRRK2 RNA guide
ugcaaguauaugugaaagag

SEQ ID NO: 93206 - RNA, 20 nt, Artificial Sequence
  LRRK2 RNA guide
ugcuagaaaaacacauguuc

SEQ ID NO: 93207 - RNA, 20 nt, Artificial Sequence
  LRRK2 RNA guide
ugugaaagaggaacaugugu

SEQ ID NO: 93208 - RNA, 20 nt, Artificial Sequence
  LRRK2 RNA guide
uguuccucuuucacauauac

SEQ ID NO: 93209 - RNA, 20 nt, Artificial Sequence
  LRRK2 RNA guide
uucauugcaaguauauguga

SEQ ID NO: 93210 - RNA, 20 nt, Artificial Sequence
  LRRK2 RNA guide
uugcaaguauaugugaaaga

SEQ ID NO: 93211 - RNA, 21 nt, Artificial Sequence
  LRRK2 RNA guide
aaaaacacauguuccucuuuc

SEQ ID NO: 93212 - RNA, 21 nt, Artificial Sequence
  LRRK2 RNA guide
aaaacacauguuccucuuuca

SEQ ID NO: 93213 - RNA, 21 nt, Artificial Sequence
  LRRK2 RNA guide
aaacacauguuccucuuucac

SEQ ID NO: 93214 - RNA, 21 nt, Artificial Sequence
  LRRK2 RNA guide
aaagaggaacauguguuuuuc

SEQ ID NO: 93215 - RNA, 21 nt, Artificial Sequence
  LRRK2 RNA guide
aacacauguuccucuuucaca

SEQ ID NO: 93216 - RNA, 21 nt, Artificial Sequence
  LRRK2 RNA guide
aagaggaacauguguuuuucu

SEQ ID NO: 93217 - RNA, 21 nt, Artificial Sequence
  LRRK2 RNA guide
aaguauaugugaaagaggaac

SEQ ID NO: 93218 - RNA, 21 nt, Artificial Sequence
  LRRK2 RNA guide
acacauguuccucuuucacau

SEQ ID NO: 93219 - RNA, 21 nt, Artificial Sequence
  LRRK2 RNA guide
acauguuccucuuucacauau

SEQ ID NO: 93220 - RNA, 21 nt, Artificial Sequence
  LRRK2 RNA guide
agaaaaacacauguuccucuu

SEQ ID NO: 93221 - RNA, 21 nt, Artificial Sequence
  LRRK2 RNA guide
agaggaacauguguuuuucua

SEQ ID NO: 93222 - RNA, 21 nt, Artificial Sequence
  LRRK2 RNA guide
aggugcuagaaaaacacaugu

SEQ ID NO: 93223 - RNA, 21 nt, Artificial Sequence
  LRRK2 RNA guide
aguauaugugaaagaggaaca

SEQ ID NO: 93224 - RNA, 21 nt, Artificial Sequence
  LRRK2 RNA guide
auaugugaaagaggaacaugu

SEQ ID NO: 93225 - RNA, 21 nt, Artificial Sequence
  LRRK2 RNA guide
augugaaagaggaacaugugu

SEQ ID NO: 93226 - RNA, 21 nt, Artificial Sequence
  LRRK2 RNA guide
auguuccucuuucacauauac

SEQ ID NO: 93227 - RNA, 21 nt, Artificial Sequence
  LRRK2 RNA guide
caaguauaugugaaagaggaa

SEQ ID NO: 93228 - RNA, 21 nt, Artificial Sequence
  LRRK2 RNA guide
cacauguuccucuuucacaua

SEQ ID NO: 93229 - RNA, 21 nt, Artificial Sequence
  LRRK2 RNA guide
cauguuccucuuucacauaua

SEQ ID NO: 93230 - RNA, 21 nt, Artificial Sequence
  LRRK2 RNA guide
cauugcaaguauaugugaaag

SEQ ID NO: 93231 - RNA, 21 nt, Artificial Sequence
  LRRK2 RNA guide
ccucuuucacauauacuugca

SEQ ID NO: 93232 - RNA, 21 nt, Artificial Sequence
  LRRK2 RNA guide
cuagaaaaacacauguuccuc

SEQ ID NO: 93233 - RNA, 21 nt, Artificial Sequence
  LRRK2 RNA guide
cucuuucacauauacuugcaa

SEQ ID NO: 93234 - RNA, 21 nt, Artificial Sequence
  LRRK2 RNA guide
gaaaaacacauguuccucuuu

SEQ ID NO: 93235 - RNA, 21 nt, Artificial Sequence
  LRRK2 RNA guide
gaaagaggaacauguguuuuu

SEQ ID NO: 93236 - RNA, 21 nt, Artificial Sequence
  LRRK2 RNA guide
gcaaguauaugugaaagagga

SEQ ID NO: 93237 - RNA, 21 nt, Artificial Sequence
  LRRK2 RNA guide
gcuagaaaaacacauguuccu

SEQ ID NO: 93238 - RNA, 21 nt, Artificial Sequence
  LRRK2 RNA guide
ggugcuagaaaaacacauguu

SEQ ID NO: 93239 - RNA, 21 nt, Artificial Sequence
  LRRK2 RNA guide
guauaugugaaagaggaacau

SEQ ID NO: 93240 - RNA, 21 nt, Artificial Sequence
  LRRK2 RNA guide
gugaaagaggaacauguguuu

SEQ ID NO: 93241 - RNA, 21 nt, Artificial Sequence
  LRRK2 RNA guide
gugcuagaaaaacacauguuc

SEQ ID NO: 93242 - RNA, 21 nt, Artificial Sequence
  LRRK2 RNA guide
guuccucuuucacauauacuu

SEQ ID NO: 93243 - RNA, 21 nt, Artificial Sequence
  LRRK2 RNA guide
uagaaaaacacauguuccucu

SEQ ID NO: 93244 - RNA, 21 nt, Artificial Sequence
  LRRK2 RNA guide
uauaugugaaagaggaacaug

SEQ ID NO: 93245 - RNA, 21 nt, Artificial Sequence
  LRRK2 RNA guide
uaugugaaagaggaacaugug

SEQ ID NO: 93246 - RNA, 21 nt, Artificial Sequence
  LRRK2 RNA guide
uccucuuucacauauacuugc

SEQ ID NO: 93247 - RNA, 21 nt, Artificial Sequence
  LRRK2 RNA guide
ugaaagaggaacauguguuuu

SEQ ID NO: 93248 - RNA, 21 nt, Artificial Sequence
  LRRK2 RNA guide
ugcaaguauaugugaaagagg

SEQ ID NO: 93249 - RNA, 21 nt, Artificial Sequence
  LRRK2 RNA guide
ugcuagaaaaacacauguucc

SEQ ID NO: 93250 - RNA, 21 nt, Artificial Sequence
  LRRK2 RNA guide
ugugaaagaggaacauguguu

SEQ ID NO: 93251 - RNA, 21 nt, Artificial Sequence
  LRRK2 RNA guide
uguuccucuuucacauauacu

SEQ ID NO: 93252 - RNA, 21 nt, Artificial Sequence
  LRRK2 RNA guide
uuccucuuucacauauacuug

SEQ ID NO: 93253 - RNA, 21 nt, Artificial Sequence
  LRRK2 RNA guide
uugcaaguauaugugaaagag

SEQ ID NO: 93254 - RNA, 22 nt, Artificial Sequence
  LRRK2 RNA guide
aaaaacacauguuccucuuuca

SEQ ID NO: 93255 - RNA, 22 nt, Artificial Sequence
  LRRK2 RNA guide
aaaacacauguuccucuuucac

SEQ ID NO: 93256 - RNA, 22 nt, Artificial Sequence
  LRRK2 RNA guide
aaacacauguuccucuuucaca

SEQ ID NO: 93257 - RNA, 22 nt, Artificial Sequence
  LRRK2 RNA guide
aaagaggaacauguguuuuucu

SEQ ID NO: 93258 - RNA, 22 nt, Artificial Sequence
  LRRK2 RNA guide
aacacauguuccucuuucacau

SEQ ID NO: 93259 - RNA, 22 nt, Artificial Sequence
  LRRK2 RNA guide
aagaggaacauguguuuuucua

SEQ ID NO: 93260 - RNA, 22 nt, Artificial Sequence
  LRRK2 RNA guide
aaggugcuagaaaaacacaugu

SEQ ID NO: 93261 - RNA, 22 nt, Artificial Sequence
  LRRK2 RNA guide
aaguauaugugaaagaggaaca

SEQ ID NO: 93262 - RNA, 22 nt, Artificial Sequence
  LRRK2 RNA guide
acacauguuccucuuucacaua

SEQ ID NO: 93263 - RNA, 22 nt, Artificial Sequence
  LRRK2 RNA guide
acauguuccucuuucacauaua

SEQ ID NO: 93264 - RNA, 22 nt, Artificial Sequence
  LRRK2 RNA guide
agaaaaacacauguuccucuuu

SEQ ID NO: 93265 - RNA, 22 nt, Artificial Sequence
  LRRK2 RNA guide
agaggaacauguguuuuucuag

SEQ ID NO: 93266 - RNA, 22 nt, Artificial Sequence
  LRRK2 RNA guide
aggugcuagaaaaacacauguu

SEQ ID NO: 93267 - RNA, 22 nt, Artificial Sequence
  LRRK2 RNA guide
aguauaugugaaagaggaacau

SEQ ID NO: 93268 - RNA, 22 nt, Artificial Sequence
  LRRK2 RNA guide
auaugugaaagaggaacaugug

SEQ ID NO: 93269 - RNA, 22 nt, Artificial Sequence
  LRRK2 RNA guide
augugaaagaggaacauguguu

SEQ ID NO: 93270 - RNA, 22 nt, Artificial Sequence
  LRRK2 RNA guide
auguuccucuuucacauauacu

SEQ ID NO: 93271 - RNA, 22 nt, Artificial Sequence
  LRRK2 RNA guide
auugcaaguauaugugaaagag

SEQ ID NO: 93272 - RNA, 22 nt, Artificial Sequence
  LRRK2 RNA guide
caaguauaugugaaagaggaac

SEQ ID NO: 93273 - RNA, 22 nt, Artificial Sequence
  LRRK2 RNA guide
cacauguuccucuuucacauau

SEQ ID NO: 93274 - RNA, 22 nt, Artificial Sequence
  LRRK2 RNA guide
cauguuccucuuucacauauac

SEQ ID NO: 93275 - RNA, 22 nt, Artificial Sequence
  LRRK2 RNA guide
cauugcaaguauaugugaaaga

SEQ ID NO: 93276 - RNA, 22 nt, Artificial Sequence
  LRRK2 RNA guide
ccucuuucacauauacuugcaa

SEQ ID NO: 93277 - RNA, 22 nt, Artificial Sequence
  LRRK2 RNA guide
cuagaaaaacacauguuccucu

SEQ ID NO: 93278 - RNA, 22 nt, Artificial Sequence
  LRRK2 RNA guide
cucuuucacauauacuugcaau

SEQ ID NO: 93279 - RNA, 22 nt, Artificial Sequence
  LRRK2 RNA guide
gaaaaacacauguuccucuuuc

SEQ ID NO: 93280 - RNA, 22 nt, Artificial Sequence
  LRRK2 RNA guide
gaaagaggaacauguguuuuuc

SEQ ID NO: 93281 - RNA, 22 nt, Artificial Sequence
  LRRK2 RNA guide
gcaaguauaugugaaagaggaa

SEQ ID NO: 93282 - RNA, 22 nt, Artificial Sequence
  LRRK2 RNA guide
gcuagaaaaacacauguuccuc

SEQ ID NO: 93283 - RNA, 22 nt, Artificial Sequence
  LRRK2 RNA guide
ggugcuagaaaaacacauguuc

SEQ ID NO: 93284 - RNA, 22 nt, Artificial Sequence
  LRRK2 RNA guide
guauaugugaaagaggaacaug

SEQ ID NO: 93285 - RNA, 22 nt, Artificial Sequence
  LRRK2 RNA guide
gugaaagaggaacauguguuuu

SEQ ID NO: 93286 - RNA, 22 nt, Artificial Sequence
  LRRK2 RNA guide
gugcuagaaaaacacauguucc

SEQ ID NO: 93287 - RNA, 22 nt, Artificial Sequence
  LRRK2 RNA guide
guuccucuuucacauauacuug

SEQ ID NO: 93288 - RNA, 22 nt, Artificial Sequence
  LRRK2 RNA guide
uagaaaaacacauguuccucuu

SEQ ID NO: 93289 - RNA, 22 nt, Artificial Sequence
  LRRK2 RNA guide
uauaugugaaagaggaacaugu

SEQ ID NO: 93290 - RNA, 22 nt, Artificial Sequence
  LRRK2 RNA guide
uaugugaaagaggaacaugugu

SEQ ID NO: 93291 - RNA, 22 nt, Artificial Sequence
  LRRK2 RNA guide
ucauugcaaguauaugugaaag

SEQ ID NO: 93292 - RNA, 22 nt, Artificial Sequence
  LRRK2 RNA guide
uccucuuucacauauacuugca

SEQ ID NO: 93293 - RNA, 22 nt, Artificial Sequence
  LRRK2 RNA guide
ucuuucacauauacuugcaaug

SEQ ID NO: 93294 - RNA, 22 nt, Artificial Sequence
  LRRK2 RNA guide
ugaaagaggaacauguguuuuu

SEQ ID NO: 93295 - RNA, 22 nt, Artificial Sequence
  LRRK2 RNA guide
ugcaaguauaugugaaagagga

SEQ ID NO: 93296 - RNA, 22 nt, Artificial Sequence
  LRRK2 RNA guide
ugcuagaaaaacacauguuccu

SEQ ID NO: 93297 - RNA, 22 nt, Artificial Sequence
  LRRK2 RNA guide
ugugaaagaggaacauguguuu

SEQ ID NO: 93298 - RNA, 22 nt, Artificial Sequence
  LRRK2 RNA guide
uguuccucuuucacauauacuu

SEQ ID NO: 93299 - RNA, 22 nt, Artificial Sequence
  LRRK2 RNA guide
uuccucuuucacauauacuugc

SEQ ID NO: 93300 - RNA, 22 nt, Artificial Sequence
  LRRK2 RNA guide
uugcaaguauaugugaaagagg

SEQ ID NO: 93301 - RNA, 20 nt, Artificial Sequence
  LRRK2 RNA guide
aaaacacauguuccuuuuuc

SEQ ID NO: 93302 - RNA, 20 nt, Artificial Sequence
  LRRK2 RNA guide
aaaaggaacauguguuuuuc

SEQ ID NO: 93303 - RNA, 20 nt, Artificial Sequence
  LRRK2 RNA guide
aaacacauguuccuuuuuca

SEQ ID NO: 93304 - RNA, 20 nt, Artificial Sequence
  LRRK2 RNA guide
aaaggaacauguguuuuucu

SEQ ID NO: 93305 - RNA, 20 nt, Artificial Sequence
  LRRK2 RNA guide
aacacauguuccuuuuucac

SEQ ID NO: 93306 - RNA, 20 nt, Artificial Sequence
  LRRK2 RNA guide
acacauguuccuuuuucaca

SEQ ID NO: 93307 - RNA, 20 nt, Artificial Sequence
  LRRK2 RNA guide
acauguuccuuuuucacaua

SEQ ID NO: 93308 - RNA, 20 nt, Artificial Sequence
  LRRK2 RNA guide
agaaaaacacauguuccuuu

SEQ ID NO: 93309 - RNA, 20 nt, Artificial Sequence
  LRRK2 RNA guide
aguauaugugaaaaaggaac

SEQ ID NO: 93310 - RNA, 20 nt, Artificial Sequence
  LRRK2 RNA guide
auaugugaaaaaggaacaug

SEQ ID NO: 93311 - RNA, 20 nt, Artificial Sequence
  LRRK2 RNA guide
augugaaaaaggaacaugug

SEQ ID NO: 93312 - RNA, 20 nt, Artificial Sequence
  LRRK2 RNA guide
caaguauaugugaaaaagga

SEQ ID NO: 93313 - RNA, 20 nt, Artificial Sequence
  LRRK2 RNA guide
cacauguuccuuuuucacau

SEQ ID NO: 93314 - RNA, 20 nt, Artificial Sequence
  LRRK2 RNA guide
cauguuccuuuuucacauau

SEQ ID NO: 93315 - RNA, 20 nt, Artificial Sequence
  LRRK2 RNA guide
ccuuuuucacauauacuugc

SEQ ID NO: 93316 - RNA, 20 nt, Artificial Sequence
  LRRK2 RNA guide
cuuuuucacauauacuugca

SEQ ID NO: 93317 - RNA, 20 nt, Artificial Sequence
  LRRK2 RNA guide
gaaaaacacauguuccuuuu

SEQ ID NO: 93318 - RNA, 20 nt, Artificial Sequence
  LRRK2 RNA guide
gaaaaaggaacauguguuuu

SEQ ID NO: 93319 - RNA, 20 nt, Artificial Sequence
  LRRK2 RNA guide
gcaaguauaugugaaaaagg

SEQ ID NO: 93320 - RNA, 20 nt, Artificial Sequence
  LRRK2 RNA guide
guauaugugaaaaaggaaca

SEQ ID NO: 93321 - RNA, 20 nt, Artificial Sequence
  LRRK2 RNA guide
gugaaaaaggaacauguguu

SEQ ID NO: 93322 - RNA, 20 nt, Artificial Sequence
  LRRK2 RNA guide
guuccuuuuucacauauacu

SEQ ID NO: 93323 - RNA, 20 nt, Artificial Sequence
  LRRK2 RNA guide
uagaaaaacacauguuccuu

SEQ ID NO: 93324 - RNA, 20 nt, Artificial Sequence
  LRRK2 RNA guide
uaugugaaaaaggaacaugu

SEQ ID NO: 93325 - RNA, 20 nt, Artificial Sequence
  LRRK2 RNA guide
uccuuuuucacauauacuug

SEQ ID NO: 93326 - RNA, 20 nt, Artificial Sequence
  LRRK2 RNA guide
ugaaaaaggaacauguguuu

SEQ ID NO: 93327 - RNA, 20 nt, Artificial Sequence
  LRRK2 RNA guide
ugcaaguauaugugaaaaag

SEQ ID NO: 93328 - RNA, 20 nt, Artificial Sequence
  LRRK2 RNA guide
ugugaaaaaggaacaugugu

SEQ ID NO: 93329 - RNA, 20 nt, Artificial Sequence
  LRRK2 RNA guide
uguuccuuuuucacauauac

SEQ ID NO: 93330 - RNA, 21 nt, Artificial Sequence
  LRRK2 RNA guide
aaacacauguuccuuuuucac

SEQ ID NO: 93331 - RNA, 21 nt, Artificial Sequence
  LRRK2 RNA guide
aacacauguuccuuuuucaca

SEQ ID NO: 93332 - RNA, 21 nt, Artificial Sequence
  LRRK2 RNA guide
acacauguuccuuuuucacau

SEQ ID NO: 93333 - RNA, 21 nt, Artificial Sequence
  LRRK2 RNA guide
augugaaaaaggaacaugugu

SEQ ID NO: 93334 - RNA, 21 nt, Artificial Sequence
  LRRK2 RNA guide
cacauguuccuuuuucacaua

SEQ ID NO: 93335 - RNA, 21 nt, Artificial Sequence
  LRRK2 RNA guide
ccuuuuucacauauacuugca

SEQ ID NO: 93336 - RNA, 21 nt, Artificial Sequence
  LRRK2 RNA guide
cuagaaaaacacauguuccuu

SEQ ID NO: 93337 - RNA, 21 nt, Artificial Sequence
  LRRK2 RNA guide
gcaaguauaugugaaaaagga

SEQ ID NO: 93338 - RNA, 21 nt, Artificial Sequence
  LRRK2 RNA guide
gugaaaaaggaacauguguuu

SEQ ID NO: 93339 - RNA, 21 nt, Artificial Sequence
  LRRK2 RNA guide
uaugugaaaaaggaacaugug

SEQ ID NO: 93340 - RNA, 21 nt, Artificial Sequence
  LRRK2 RNA guide
uccuuuuucacauauacuugc

SEQ ID NO: 93341 - RNA, 21 nt, Artificial Sequence
  LRRK2 RNA guide
ugcaaguauaugugaaaaagg

SEQ ID NO: 93342 - RNA, 21 nt, Artificial Sequence
  LRRK2 RNA guide
ugugaaaaaggaacauguguu

SEQ ID NO: 93343 - RNA, 22 nt, Artificial Sequence
  LRRK2 RNA guide
aaaacacauguuccuuuuucac

SEQ ID NO: 93344 - RNA, 22 nt, Artificial Sequence
  LRRK2 RNA guide
aaacacauguuccuuuuucaca

SEQ ID NO: 93345 - RNA, 22 nt, Artificial Sequence
  LRRK2 RNA guide
aaaggaacauguguuuuucuag

SEQ ID NO: 93346 - RNA, 22 nt, Artificial Sequence
  LRRK2 RNA guide
aacacauguuccuuuuucacau

SEQ ID NO: 93347 - RNA, 22 nt, Artificial Sequence
  LRRK2 RNA guide
acacauguuccuuuuucacaua

SEQ ID NO: 93348 - RNA, 22 nt, Artificial Sequence
  LRRK2 RNA guide
auaugugaaaaaggaacaugug

SEQ ID NO: 93349 - RNA, 22 nt, Artificial Sequence
  LRRK2 RNA guide
augugaaaaaggaacauguguu

SEQ ID NO: 93350 - RNA, 22 nt, Artificial Sequence
  LRRK2 RNA guide
caaguauaugugaaaaaggaac

SEQ ID NO: 93351 - RNA, 22 nt, Artificial Sequence
  LRRK2 RNA guide
cacauguuccuuuuucacauau

SEQ ID NO: 93352 - RNA, 22 nt, Artificial Sequence
  LRRK2 RNA guide
cauguuccuuuuucacauauac

SEQ ID NO: 93353 - RNA, 22 nt, Artificial Sequence
  LRRK2 RNA guide
ccuuuuucacauauacuugcaa

SEQ ID NO: 93354 - RNA, 22 nt, Artificial Sequence
  LRRK2 RNA guide
cuagaaaaacacauguuccuuu

SEQ ID NO: 93355 - RNA, 22 nt, Artificial Sequence
  LRRK2 RNA guide
gaaaaacacauguuccuuuuuc

SEQ ID NO: 93356 - RNA, 22 nt, Artificial Sequence
  LRRK2 RNA guide
gaaaaaggaacauguguuuuuc

SEQ ID NO: 93357 - RNA, 22 nt, Artificial Sequence
  LRRK2 RNA guide
gcaaguauaugugaaaaaggaa

SEQ ID NO: 93358 - RNA, 22 nt, Artificial Sequence
  LRRK2 RNA guide
gcuagaaaaacacauguuccuu

SEQ ID NO: 93359 - RNA, 22 nt, Artificial Sequence
  LRRK2 RNA guide
guauaugugaaaaaggaacaug

SEQ ID NO: 93360 - RNA, 22 nt, Artificial Sequence
  LRRK2 RNA guide
gugaaaaaggaacauguguuuu

SEQ ID NO: 93361 - RNA, 22 nt, Artificial Sequence
  LRRK2 RNA guide
guuccuuuuucacauauacuug

SEQ ID NO: 93362 - RNA, 22 nt, Artificial Sequence
  LRRK2 RNA guide
uaugugaaaaaggaacaugugu

SEQ ID NO: 93363 - RNA, 22 nt, Artificial Sequence
  LRRK2 RNA guide
uccuuuuucacauauacuugca

SEQ ID NO: 93364 - RNA, 22 nt, Artificial Sequence
  LRRK2 RNA guide
ugcaaguauaugugaaaaagga

SEQ ID NO: 93365 - RNA, 22 nt, Artificial Sequence
  LRRK2 RNA guide
ugugaaaaaggaacauguguuu

SEQ ID NO: 93366 - RNA, 22 nt, Artificial Sequence
  LRRK2 RNA guide
uuccuuuuucacauauacuugc

SEQ ID NO: 93367 - RNA, 22 nt, Artificial Sequence
  LRRK2 RNA guide
uugcaaguauaugugaaaaagg

SEQ ID NO: 93368 - RNA, 20 nt, Artificial Sequence
  LRRK2 RNA guide
aaacuauaacccauagacau

SEQ ID NO: 93369 - RNA, 20 nt, Artificial Sequence
  LRRK2 RNA guide
aacccauagacauuccacua

SEQ ID NO: 93370 - RNA, 20 nt, Artificial Sequence
  LRRK2 RNA guide
aacuauaacccauagacauu

SEQ ID NO: 93371 - RNA, 20 nt, Artificial Sequence
  LRRK2 RNA guide
aacugaaguuauaguggaau

SEQ ID NO: 93372 - RNA, 20 nt, Artificial Sequence
  LRRK2 RNA guide
aaguuauaguggaaugucua

SEQ ID NO: 93373 - RNA, 20 nt, Artificial Sequence
  LRRK2 RNA guide
aaucaaacuauaacccauag

SEQ ID NO: 93374 - RNA, 20 nt, Artificial Sequence
  LRRK2 RNA guide
aaugucuauggguuauaguu

SEQ ID NO: 93375 - RNA, 20 nt, Artificial Sequence
  LRRK2 RNA guide
acccauagacauuccacuau

SEQ ID NO: 93376 - RNA, 20 nt, Artificial Sequence
  LRRK2 RNA guide
acuauaacccauagacauuc

SEQ ID NO: 93377 - RNA, 20 nt, Artificial Sequence
  LRRK2 RNA guide
acugaaguuauaguggaaug

SEQ ID NO: 93378 - RNA, 20 nt, Artificial Sequence
  LRRK2 RNA guide
aguggaaugucuauggguua

SEQ ID NO: 93379 - RNA, 20 nt, Artificial Sequence
  LRRK2 RNA guide
aguuauaguggaaugucuau

SEQ ID NO: 93380 - RNA, 20 nt, Artificial Sequence
  LRRK2 RNA guide
auaacccauagacauuccac

SEQ ID NO: 93381 - RNA, 20 nt, Artificial Sequence
  LRRK2 RNA guide
auagacauuccacuauaacu

SEQ ID NO: 93382 - RNA, 20 nt, Artificial Sequence
  LRRK2 RNA guide
auaguggaaugucuaugggu

SEQ ID NO: 93383 - RNA, 20 nt, Artificial Sequence
  LRRK2 RNA guide
aucaaacuauaacccauaga

SEQ ID NO: 93384 - RNA, 20 nt, Artificial Sequence
  LRRK2 RNA guide
augucuauggguuauaguuu

SEQ ID NO: 93385 - RNA, 20 nt, Artificial Sequence
  LRRK2 RNA guide
caaacuauaacccauagaca

SEQ ID NO: 93386 - RNA, 20 nt, Artificial Sequence
  LRRK2 RNA guide
cauagacauuccacuauaac

SEQ ID NO: 93387 - RNA, 20 nt, Artificial Sequence
  LRRK2 RNA guide
ccauagacauuccacuauaa

SEQ ID NO: 93388 - RNA, 20 nt, Artificial Sequence
  LRRK2 RNA guide
cccauagacauuccacuaua

SEQ ID NO: 93389 - RNA, 20 nt, Artificial Sequence
  LRRK2 RNA guide
cuauaacccauagacauucc

SEQ ID NO: 93390 - RNA, 20 nt, Artificial Sequence
  LRRK2 RNA guide
cuauggguuauaguuugauu

SEQ ID NO: 93391 - RNA, 20 nt, Artificial Sequence
  LRRK2 RNA guide
cugaaguuauaguggaaugu

SEQ ID NO: 93392 - RNA, 20 nt, Artificial Sequence
  LRRK2 RNA guide
gaaguuauaguggaaugucu

SEQ ID NO: 93393 - RNA, 20 nt, Artificial Sequence
  LRRK2 RNA guide
gaaugucuauggguuauagu

SEQ ID NO: 93394 - RNA, 20 nt, Artificial Sequence
  LRRK2 RNA guide
ggaaugucuauggguuauag

SEQ ID NO: 93395 - RNA, 20 nt, Artificial Sequence
  LRRK2 RNA guide
gucuauggguuauaguuuga

SEQ ID NO: 93396 - RNA, 20 nt, Artificial Sequence
  LRRK2 RNA guide
guggaaugucuauggguuau

SEQ ID NO: 93397 - RNA, 20 nt, Artificial Sequence
  LRRK2 RNA guide
guuauaguggaaugucuaug

SEQ ID NO: 93398 - RNA, 20 nt, Artificial Sequence
  LRRK2 RNA guide
uaacccauagacauuccacu

SEQ ID NO: 93399 - RNA, 20 nt, Artificial Sequence
  LRRK2 RNA guide
uaacugaaguuauaguggaa

SEQ ID NO: 93400 - RNA, 20 nt, Artificial Sequence
  LRRK2 RNA guide
uagacauuccacuauaacuu

SEQ ID NO: 93401 - RNA, 20 nt, Artificial Sequence
  LRRK2 RNA guide
uaguggaaugucuauggguu

SEQ ID NO: 93402 - RNA, 20 nt, Artificial Sequence
  LRRK2 RNA guide
uauaacccauagacauucca

SEQ ID NO: 93403 - RNA, 20 nt, Artificial Sequence
  LRRK2 RNA guide
uauaguggaaugucuauggg

SEQ ID NO: 93404 - RNA, 20 nt, Artificial Sequence
  LRRK2 RNA guide
ucaaacuauaacccauagac

SEQ ID NO: 93405 - RNA, 20 nt, Artificial Sequence
  LRRK2 RNA guide
ucuauggguuauaguuugau

SEQ ID NO: 93406 - RNA, 20 nt, Artificial Sequence
  LRRK2 RNA guide
ugaaguuauaguggaauguc

SEQ ID NO: 93407 - RNA, 20 nt, Artificial Sequence
  LRRK2 RNA guide
uggaaugucuauggguuaua

SEQ ID NO: 93408 - RNA, 20 nt, Artificial Sequence
  LRRK2 RNA guide
ugucuauggguuauaguuug

SEQ ID NO: 93409 - RNA, 20 nt, Artificial Sequence
  LRRK2 RNA guide
uuauaguggaaugucuaugg

SEQ ID NO: 93410 - RNA, 21 nt, Artificial Sequence
  LRRK2 RNA guide
aacccauagacauuccacuau

SEQ ID NO: 93411 - RNA, 21 nt, Artificial Sequence
  LRRK2 RNA guide
aacuauaacccauagacauuc

SEQ ID NO: 93412 - RNA, 21 nt, Artificial Sequence
  LRRK2 RNA guide
aacugaaguuauaguggaaug

SEQ ID NO: 93413 - RNA, 21 nt, Artificial Sequence
  LRRK2 RNA guide
acccauagacauuccacuaua

SEQ ID NO: 93414 - RNA, 21 nt, Artificial Sequence
  LRRK2 RNA guide
acuauaacccauagacauucc

SEQ ID NO: 93415 - RNA, 21 nt, Artificial Sequence
  LRRK2 RNA guide
acugaaguuauaguggaaugu

SEQ ID NO: 93416 - RNA, 21 nt, Artificial Sequence
  LRRK2 RNA guide
aguggaaugucuauggguuau

SEQ ID NO: 93417 - RNA, 21 nt, Artificial Sequence
  LRRK2 RNA guide
aguuauaguggaaugucuaug

SEQ ID NO: 93418 - RNA, 21 nt, Artificial Sequence
  LRRK2 RNA guide
auaacccauagacauuccacu

SEQ ID NO: 93419 - RNA, 21 nt, Artificial Sequence
  LRRK2 RNA guide
auaguggaaugucuauggguu

SEQ ID NO: 93420 - RNA, 21 nt, Artificial Sequence
  LRRK2 RNA guide
aucaaacuauaacccauagac

SEQ ID NO: 93421 - RNA, 21 nt, Artificial Sequence
  LRRK2 RNA guide
augucuauggguuauaguuug

SEQ ID NO: 93422 - RNA, 21 nt, Artificial Sequence
  LRRK2 RNA guide
caaacuauaacccauagacau

SEQ ID NO: 93423 - RNA, 21 nt, Artificial Sequence
  LRRK2 RNA guide
cauagacauuccacuauaacu

SEQ ID NO: 93424 - RNA, 21 nt, Artificial Sequence
  LRRK2 RNA guide
ccauagacauuccacuauaac

SEQ ID NO: 93425 - RNA, 21 nt, Artificial Sequence
  LRRK2 RNA guide
cccauagacauuccacuauaa

SEQ ID NO: 93426 - RNA, 21 nt, Artificial Sequence
  LRRK2 RNA guide
cuauaacccauagacauucca

SEQ ID NO: 93427 - RNA, 21 nt, Artificial Sequence
  LRRK2 RNA guide
cugaaguuauaguggaauguc

SEQ ID NO: 93428 - RNA, 21 nt, Artificial Sequence
  LRRK2 RNA guide
gaaguuauaguggaaugucua

SEQ ID NO: 93429 - RNA, 21 nt, Artificial Sequence
  LRRK2 RNA guide
gaaugucuauggguuauaguu

SEQ ID NO: 93430 - RNA, 21 nt, Artificial Sequence
  LRRK2 RNA guide
ggaaugucuauggguuauagu

SEQ ID NO: 93431 - RNA, 21 nt, Artificial Sequence
  LRRK2 RNA guide
gucuauggguuauaguuugau

SEQ ID NO: 93432 - RNA, 21 nt, Artificial Sequence
  LRRK2 RNA guide
guggaaugucuauggguuaua

SEQ ID NO: 93433 - RNA, 21 nt, Artificial Sequence
  LRRK2 RNA guide
guuauaguggaaugucuaugg

SEQ ID NO: 93434 - RNA, 21 nt, Artificial Sequence
  LRRK2 RNA guide
uaacccauagacauuccacua

SEQ ID NO: 93435 - RNA, 21 nt, Artificial Sequence
  LRRK2 RNA guide
uagacauuccacuauaacuuc

SEQ ID NO: 93436 - RNA, 21 nt, Artificial Sequence
  LRRK2 RNA guide
uaguggaaugucuauggguua

SEQ ID NO: 93437 - RNA, 21 nt, Artificial Sequence
  LRRK2 RNA guide
uauaacccauagacauuccac

SEQ ID NO: 93438 - RNA, 21 nt, Artificial Sequence
  LRRK2 RNA guide
uauaguggaaugucuaugggu

SEQ ID NO: 93439 - RNA, 21 nt, Artificial Sequence
  LRRK2 RNA guide
ucaaacuauaacccauagaca

SEQ ID NO: 93440 - RNA, 21 nt, Artificial Sequence
  LRRK2 RNA guide
ugaaguuauaguggaaugucu

SEQ ID NO: 93441 - RNA, 21 nt, Artificial Sequence
  LRRK2 RNA guide
uggaaugucuauggguuauag

SEQ ID NO: 93442 - RNA, 21 nt, Artificial Sequence
  LRRK2 RNA guide
ugucuauggguuauaguuuga

SEQ ID NO: 93443 - RNA, 21 nt, Artificial Sequence
  LRRK2 RNA guide
uuauaguggaaugucuauggg

SEQ ID NO: 93444 - RNA, 22 nt, Artificial Sequence
  LRRK2 RNA guide
aaacuauaacccauagacauuc

SEQ ID NO: 93445 - RNA, 22 nt, Artificial Sequence
  LRRK2 RNA guide
aacccauagacauuccacuaua

SEQ ID NO: 93446 - RNA, 22 nt, Artificial Sequence
  LRRK2 RNA guide
aacuauaacccauagacauucc

SEQ ID NO: 93447 - RNA, 22 nt, Artificial Sequence
  LRRK2 RNA guide
aacugaaguuauaguggaaugu

SEQ ID NO: 93448 - RNA, 22 nt, Artificial Sequence
  LRRK2 RNA guide
aaguuauaguggaaugucuaug

SEQ ID NO: 93449 - RNA, 22 nt, Artificial Sequence
  LRRK2 RNA guide
aaucaaacuauaacccauagac

SEQ ID NO: 93450 - RNA, 22 nt, Artificial Sequence
  LRRK2 RNA guide
aaugucuauggguuauaguuug

SEQ ID NO: 93451 - RNA, 22 nt, Artificial Sequence
  LRRK2 RNA guide
acccauagacauuccacuauaa

SEQ ID NO: 93452 - RNA, 22 nt, Artificial Sequence
  LRRK2 RNA guide
acuauaacccauagacauucca

SEQ ID NO: 93453 - RNA, 22 nt, Artificial Sequence
  LRRK2 RNA guide
acugaaguuauaguggaauguc

SEQ ID NO: 93454 - RNA, 22 nt, Artificial Sequence
  LRRK2 RNA guide
aguggaaugucuauggguuaua

SEQ ID NO: 93455 - RNA, 22 nt, Artificial Sequence
  LRRK2 RNA guide
aguuauaguggaaugucuaugg

SEQ ID NO: 93456 - RNA, 22 nt, Artificial Sequence
  LRRK2 RNA guide
auaacccauagacauuccacua

SEQ ID NO: 93457 - RNA, 22 nt, Artificial Sequence
  LRRK2 RNA guide
auagacauuccacuauaacuuc

SEQ ID NO: 93458 - RNA, 22 nt, Artificial Sequence
  LRRK2 RNA guide
auaguggaaugucuauggguua

SEQ ID NO: 93459 - RNA, 22 nt, Artificial Sequence
  LRRK2 RNA guide
aucaaacuauaacccauagaca

SEQ ID NO: 93460 - RNA, 22 nt, Artificial Sequence
  LRRK2 RNA guide
augucuauggguuauaguuuga

SEQ ID NO: 93461 - RNA, 22 nt, Artificial Sequence
  LRRK2 RNA guide
caaacuauaacccauagacauu

SEQ ID NO: 93462 - RNA, 22 nt, Artificial Sequence
  LRRK2 RNA guide
cauagacauuccacuauaacuu

SEQ ID NO: 93463 - RNA, 22 nt, Artificial Sequence
  LRRK2 RNA guide
ccauagacauuccacuauaacu

SEQ ID NO: 93464 - RNA, 22 nt, Artificial Sequence
  LRRK2 RNA guide
cccauagacauuccacuauaac

SEQ ID NO: 93465 - RNA, 22 nt, Artificial Sequence
  LRRK2 RNA guide
cuauaacccauagacauuccac

SEQ ID NO: 93466 - RNA, 22 nt, Artificial Sequence
  LRRK2 RNA guide
cugaaguuauaguggaaugucu

SEQ ID NO: 93467 - RNA, 22 nt, Artificial Sequence
  LRRK2 RNA guide
gaaguuauaguggaaugucuau

SEQ ID NO: 93468 - RNA, 22 nt, Artificial Sequence
  LRRK2 RNA guide
gaaugucuauggguuauaguuu

SEQ ID NO: 93469 - RNA, 22 nt, Artificial Sequence
  LRRK2 RNA guide
ggaaugucuauggguuauaguu

SEQ ID NO: 93470 - RNA, 22 nt, Artificial Sequence
  LRRK2 RNA guide
gucuauggguuauaguuugauu

SEQ ID NO: 93471 - RNA, 22 nt, Artificial Sequence
  LRRK2 RNA guide
guggaaugucuauggguuauag

SEQ ID NO: 93472 - RNA, 22 nt, Artificial Sequence
  LRRK2 RNA guide
guuauaguggaaugucuauggg

SEQ ID NO: 93473 - RNA, 22 nt, Artificial Sequence
  LRRK2 RNA guide
uaacccauagacauuccacuau

SEQ ID NO: 93474 - RNA, 22 nt, Artificial Sequence
  LRRK2 RNA guide
uaacugaaguuauaguggaaug

SEQ ID NO: 93475 - RNA, 22 nt, Artificial Sequence
  LRRK2 RNA guide
uagacauuccacuauaacuuca

SEQ ID NO: 93476 - RNA, 22 nt, Artificial Sequence
  LRRK2 RNA guide
uaguggaaugucuauggguuau

SEQ ID NO: 93477 - RNA, 22 nt, Artificial Sequence
  LRRK2 RNA guide
uauaacccauagacauuccacu

SEQ ID NO: 93478 - RNA, 22 nt, Artificial Sequence
  LRRK2 RNA guide
uauaguggaaugucuauggguu

SEQ ID NO: 93479 - RNA, 22 nt, Artificial Sequence
  LRRK2 RNA guide
ucaaacuauaacccauagacau

SEQ ID NO: 93480 - RNA, 22 nt, Artificial Sequence
  LRRK2 RNA guide
ugaaguuauaguggaaugucua

SEQ ID NO: 93481 - RNA, 22 nt, Artificial Sequence
  LRRK2 RNA guide
uggaaugucuauggguuauagu

SEQ ID NO: 93482 - RNA, 22 nt, Artificial Sequence
  LRRK2 RNA guide
ugucuauggguuauaguuugau

SEQ ID NO: 93483 - RNA, 22 nt, Artificial Sequence
  LRRK2 RNA guide
uuauaguggaaugucuaugggu

SEQ ID NO: 93484 - RNA, 20 nt, Artificial Sequence
  LRRK2 RNA guide
aaacuauaacccauugacau

SEQ ID NO: 93485 - RNA, 20 nt, Artificial Sequence
  LRRK2 RNA guide
aacccauugacauuccacua

SEQ ID NO: 93486 - RNA, 20 nt, Artificial Sequence
  LRRK2 RNA guide
aacuauaacccauugacauu

SEQ ID NO: 93487 - RNA, 20 nt, Artificial Sequence
  LRRK2 RNA guide
aaguuauaguggaaugucaa

SEQ ID NO: 93488 - RNA, 20 nt, Artificial Sequence
  LRRK2 RNA guide
aaucaaacuauaacccauug

SEQ ID NO: 93489 - RNA, 20 nt, Artificial Sequence
  LRRK2 RNA guide
aaugucaauggguuauaguu

SEQ ID NO: 93490 - RNA, 20 nt, Artificial Sequence
  LRRK2 RNA guide
acccauugacauuccacuau

SEQ ID NO: 93491 - RNA, 20 nt, Artificial Sequence
  LRRK2 RNA guide
acuauaacccauugacauuc

SEQ ID NO: 93492 - RNA, 20 nt, Artificial Sequence
  LRRK2 RNA guide
aguggaaugucaauggguua

SEQ ID NO: 93493 - RNA, 20 nt, Artificial Sequence
  LRRK2 RNA guide
aguuauaguggaaugucaau

SEQ ID NO: 93494 - RNA, 20 nt, Artificial Sequence
  LRRK2 RNA guide
auaacccauugacauuccac

SEQ ID NO: 93495 - RNA, 20 nt, Artificial Sequence
  LRRK2 RNA guide
auaguggaaugucaaugggu

SEQ ID NO: 93496 - RNA, 20 nt, Artificial Sequence
  LRRK2 RNA guide
aucaaacuauaacccauuga

SEQ ID NO: 93497 - RNA, 20 nt, Artificial Sequence
  LRRK2 RNA guide
augucaauggguuauaguuu

SEQ ID NO: 93498 - RNA, 20 nt, Artificial Sequence
  LRRK2 RNA guide
auugacauuccacuauaacu

SEQ ID NO: 93499 - RNA, 20 nt, Artificial Sequence
  LRRK2 RNA guide
caaacuauaacccauugaca

SEQ ID NO: 93500 - RNA, 20 nt, Artificial Sequence
  LRRK2 RNA guide
caauggguuauaguuugauu

SEQ ID NO: 93501 - RNA, 20 nt, Artificial Sequence
  LRRK2 RNA guide
cauugacauuccacuauaac

SEQ ID NO: 93502 - RNA, 20 nt, Artificial Sequence
  LRRK2 RNA guide
ccauugacauuccacuauaa

SEQ ID NO: 93503 - RNA, 20 nt, Artificial Sequence
  LRRK2 RNA guide
cccauugacauuccacuaua

SEQ ID NO: 93504 - RNA, 20 nt, Artificial Sequence
  LRRK2 RNA guide
cuauaacccauugacauucc

SEQ ID NO: 93505 - RNA, 20 nt, Artificial Sequence
  LRRK2 RNA guide
gaaguuauaguggaauguca

SEQ ID NO: 93506 - RNA, 20 nt, Artificial Sequence
  LRRK2 RNA guide
gaaugucaauggguuauagu

SEQ ID NO: 93507 - RNA, 20 nt, Artificial Sequence
  LRRK2 RNA guide
ggaaugucaauggguuauag

SEQ ID NO: 93508 - RNA, 20 nt, Artificial Sequence
  LRRK2 RNA guide
gucaauggguuauaguuuga

SEQ ID NO: 93509 - RNA, 20 nt, Artificial Sequence
  LRRK2 RNA guide
guggaaugucaauggguuau

SEQ ID NO: 93510 - RNA, 20 nt, Artificial Sequence
  LRRK2 RNA guide
guuauaguggaaugucaaug

SEQ ID NO: 93511 - RNA, 20 nt, Artificial Sequence
  LRRK2 RNA guide
uaacccauugacauuccacu

SEQ ID NO: 93512 - RNA, 20 nt, Artificial Sequence
  LRRK2 RNA guide
uaguggaaugucaauggguu

SEQ ID NO: 93513 - RNA, 20 nt, Artificial Sequence
  LRRK2 RNA guide
uauaacccauugacauucca

SEQ ID NO: 93514 - RNA, 20 nt, Artificial Sequence
  LRRK2 RNA guide
uauaguggaaugucaauggg

SEQ ID NO: 93515 - RNA, 20 nt, Artificial Sequence
  LRRK2 RNA guide
ucaaacuauaacccauugac

SEQ ID NO: 93516 - RNA, 20 nt, Artificial Sequence
  LRRK2 RNA guide
ucaauggguuauaguuugau

SEQ ID NO: 93517 - RNA, 20 nt, Artificial Sequence
  LRRK2 RNA guide
uggaaugucaauggguuaua

SEQ ID NO: 93518 - RNA, 20 nt, Artificial Sequence
  LRRK2 RNA guide
ugucaauggguuauaguuug

SEQ ID NO: 93519 - RNA, 20 nt, Artificial Sequence
  LRRK2 RNA guide
uuauaguggaaugucaaugg

SEQ ID NO: 93520 - RNA, 20 nt, Artificial Sequence
  LRRK2 RNA guide
uugacauuccacuauaacuu

SEQ ID NO: 93521 - RNA, 21 nt, Artificial Sequence
  LRRK2 RNA guide
aacccauugacauuccacuau

SEQ ID NO: 93522 - RNA, 21 nt, Artificial Sequence
  LRRK2 RNA guide
aacuauaacccauugacauuc

SEQ ID NO: 93523 - RNA, 21 nt, Artificial Sequence
  LRRK2 RNA guide
acccauugacauuccacuaua

SEQ ID NO: 93524 - RNA, 21 nt, Artificial Sequence
  LRRK2 RNA guide
acuauaacccauugacauucc

SEQ ID NO: 93525 - RNA, 21 nt, Artificial Sequence
  LRRK2 RNA guide
aguggaaugucaauggguuau

SEQ ID NO: 93526 - RNA, 21 nt, Artificial Sequence
  LRRK2 RNA guide
aguuauaguggaaugucaaug

SEQ ID NO: 93527 - RNA, 21 nt, Artificial Sequence
  LRRK2 RNA guide
auaacccauugacauuccacu

SEQ ID NO: 93528 - RNA, 21 nt, Artificial Sequence
  LRRK2 RNA guide
auaguggaaugucaauggguu

SEQ ID NO: 93529 - RNA, 21 nt, Artificial Sequence
  LRRK2 RNA guide
aucaaacuauaacccauugac

SEQ ID NO: 93530 - RNA, 21 nt, Artificial Sequence
  LRRK2 RNA guide
augucaauggguuauaguuug

SEQ ID NO: 93531 - RNA, 21 nt, Artificial Sequence
  LRRK2 RNA guide
caaacuauaacccauugacau

SEQ ID NO: 93532 - RNA, 21 nt, Artificial Sequence
  LRRK2 RNA guide
cauugacauuccacuauaacu

SEQ ID NO: 93533 - RNA, 21 nt, Artificial Sequence
  LRRK2 RNA guide
ccauugacauuccacuauaac

SEQ ID NO: 93534 - RNA, 21 nt, Artificial Sequence
  LRRK2 RNA guide
cccauugacauuccacuauaa

SEQ ID NO: 93535 - RNA, 21 nt, Artificial Sequence
  LRRK2 RNA guide
cuauaacccauugacauucca

SEQ ID NO: 93536 - RNA, 21 nt, Artificial Sequence
  LRRK2 RNA guide
gaaguuauaguggaaugucaa

SEQ ID NO: 93537 - RNA, 21 nt, Artificial Sequence
  LRRK2 RNA guide
gaaugucaauggguuauaguu

SEQ ID NO: 93538 - RNA, 21 nt, Artificial Sequence
  LRRK2 RNA guide
ggaaugucaauggguuauagu

SEQ ID NO: 93539 - RNA, 21 nt, Artificial Sequence
  LRRK2 RNA guide
gucaauggguuauaguuugau

SEQ ID NO: 93540 - RNA, 21 nt, Artificial Sequence
  LRRK2 RNA guide
guggaaugucaauggguuaua

SEQ ID NO: 93541 - RNA, 21 nt, Artificial Sequence
  LRRK2 RNA guide
guuauaguggaaugucaaugg

SEQ ID NO: 93542 - RNA, 21 nt, Artificial Sequence
  LRRK2 RNA guide
uaacccauugacauuccacua

SEQ ID NO: 93543 - RNA, 21 nt, Artificial Sequence
  LRRK2 RNA guide
uaguggaaugucaauggguua

SEQ ID NO: 93544 - RNA, 21 nt, Artificial Sequence
  LRRK2 RNA guide
uauaacccauugacauuccac

SEQ ID NO: 93545 - RNA, 21 nt, Artificial Sequence
  LRRK2 RNA guide
uauaguggaaugucaaugggu

SEQ ID NO: 93546 - RNA, 21 nt, Artificial Sequence
  LRRK2 RNA guide
ucaaacuauaacccauugaca

SEQ ID NO: 93547 - RNA, 21 nt, Artificial Sequence
  LRRK2 RNA guide
ugaaguuauaguggaauguca

SEQ ID NO: 93548 - RNA, 21 nt, Artificial Sequence
  LRRK2 RNA guide
uggaaugucaauggguuauag

SEQ ID NO: 93549 - RNA, 21 nt, Artificial Sequence
  LRRK2 RNA guide
ugucaauggguuauaguuuga

SEQ ID NO: 93550 - RNA, 21 nt, Artificial Sequence
  LRRK2 RNA guide
uuauaguggaaugucaauggg

SEQ ID NO: 93551 - RNA, 21 nt, Artificial Sequence
  LRRK2 RNA guide
uugacauuccacuauaacuuc

SEQ ID NO: 93552 - RNA, 22 nt, Artificial Sequence
  LRRK2 RNA guide
aaacuauaacccauugacauuc

SEQ ID NO: 93553 - RNA, 22 nt, Artificial Sequence
  LRRK2 RNA guide
aacccauugacauuccacuaua

SEQ ID NO: 93554 - RNA, 22 nt, Artificial Sequence
  LRRK2 RNA guide
aacuauaacccauugacauucc

SEQ ID NO: 93555 - RNA, 22 nt, Artificial Sequence
  LRRK2 RNA guide
aaguuauaguggaaugucaaug

SEQ ID NO: 93556 - RNA, 22 nt, Artificial Sequence
  LRRK2 RNA guide
aaucaaacuauaacccauugac

SEQ ID NO: 93557 - RNA, 22 nt, Artificial Sequence
  LRRK2 RNA guide
aaugucaauggguuauaguuug

SEQ ID NO: 93558 - RNA, 22 nt, Artificial Sequence
  LRRK2 RNA guide
acccauugacauuccacuauaa

SEQ ID NO: 93559 - RNA, 22 nt, Artificial Sequence
  LRRK2 RNA guide
acuauaacccauugacauucca

SEQ ID NO: 93560 - RNA, 22 nt, Artificial Sequence
  LRRK2 RNA guide
aguggaaugucaauggguuaua

SEQ ID NO: 93561 - RNA, 22 nt, Artificial Sequence
  LRRK2 RNA guide
aguuauaguggaaugucaaugg

SEQ ID NO: 93562 - RNA, 22 nt, Artificial Sequence
  LRRK2 RNA guide
auaacccauugacauuccacua

SEQ ID NO: 93563 - RNA, 22 nt, Artificial Sequence
  LRRK2 RNA guide
auaguggaaugucaauggguua

SEQ ID NO: 93564 - RNA, 22 nt, Artificial Sequence
  LRRK2 RNA guide
aucaaacuauaacccauugaca

SEQ ID NO: 93565 - RNA, 22 nt, Artificial Sequence
  LRRK2 RNA guide
augucaauggguuauaguuuga

SEQ ID NO: 93566 - RNA, 22 nt, Artificial Sequence
  LRRK2 RNA guide
auugacauuccacuauaacuuc

SEQ ID NO: 93567 - RNA, 22 nt, Artificial Sequence
  LRRK2 RNA guide
caaacuauaacccauugacauu

SEQ ID NO: 93568 - RNA, 22 nt, Artificial Sequence
  LRRK2 RNA guide
cauugacauuccacuauaacuu

SEQ ID NO: 93569 - RNA, 22 nt, Artificial Sequence
  LRRK2 RNA guide
ccauugacauuccacuauaacu

SEQ ID NO: 93570 - RNA, 22 nt, Artificial Sequence
  LRRK2 RNA guide
cccauugacauuccacuauaac

SEQ ID NO: 93571 - RNA, 22 nt, Artificial Sequence
  LRRK2 RNA guide
cuauaacccauugacauuccac

SEQ ID NO: 93572 - RNA, 22 nt, Artificial Sequence
  LRRK2 RNA guide
cugaaguuauaguggaauguca

SEQ ID NO: 93573 - RNA, 22 nt, Artificial Sequence
  LRRK2 RNA guide
gaaguuauaguggaaugucaau

SEQ ID NO: 93574 - RNA, 22 nt, Artificial Sequence
  LRRK2 RNA guide
gaaugucaauggguuauaguuu

SEQ ID NO: 93575 - RNA, 22 nt, Artificial Sequence
  LRRK2 RNA guide
ggaaugucaauggguuauaguu

SEQ ID NO: 93576 - RNA, 22 nt, Artificial Sequence
  LRRK2 RNA guide
gucaauggguuauaguuugauu

SEQ ID NO: 93577 - RNA, 22 nt, Artificial Sequence
  LRRK2 RNA guide
guggaaugucaauggguuauag

SEQ ID NO: 93578 - RNA, 22 nt, Artificial Sequence
  LRRK2 RNA guide
guuauaguggaaugucaauggg

SEQ ID NO: 93579 - RNA, 22 nt, Artificial Sequence
  LRRK2 RNA guide
uaacccauugacauuccacuau

SEQ ID NO: 93580 - RNA, 22 nt, Artificial Sequence
  LRRK2 RNA guide
uaguggaaugucaauggguuau

SEQ ID NO: 93581 - RNA, 22 nt, Artificial Sequence
  LRRK2 RNA guide
uauaacccauugacauuccacu

SEQ ID NO: 93582 - RNA, 22 nt, Artificial Sequence
  LRRK2 RNA guide
uauaguggaaugucaauggguu

SEQ ID NO: 93583 - RNA, 22 nt, Artificial Sequence
  LRRK2 RNA guide
ucaaacuauaacccauugacau

SEQ ID NO: 93584 - RNA, 22 nt, Artificial Sequence
  LRRK2 RNA guide
ugaaguuauaguggaaugucaa

SEQ ID NO: 93585 - RNA, 22 nt, Artificial Sequence
  LRRK2 RNA guide
uggaaugucaauggguuauagu

SEQ ID NO: 93586 - RNA, 22 nt, Artificial Sequence
  LRRK2 RNA guide
ugucaauggguuauaguuugau

SEQ ID NO: 93587 - RNA, 22 nt, Artificial Sequence
  LRRK2 RNA guide
uuauaguggaaugucaaugggu

SEQ ID NO: 93588 - RNA, 22 nt, Artificial Sequence
  LRRK2 RNA guide
uugacauuccacuauaacuuca

SEQ ID NO: 93589 - RNA, 20 nt, Artificial Sequence
  LRRK2 RNA guide
aacuggauguucaucuagac

SEQ ID NO: 93590 - RNA, 20 nt, Artificial Sequence
  LRRK2 RNA guide
aagaacuggauguucaucua

SEQ ID NO: 93591 - RNA, 20 nt, Artificial Sequence
  LRRK2 RNA guide
aauugagaagaacuggaugu

SEQ ID NO: 93592 - RNA, 20 nt, Artificial Sequence
  LRRK2 RNA guide
accagaucuugcuugucuag

SEQ ID NO: 93593 - RNA, 20 nt, Artificial Sequence
  LRRK2 RNA guide
acuggauguucaucuagaca

SEQ ID NO: 93594 - RNA, 20 nt, Artificial Sequence
  LRRK2 RNA guide
agaacuggauguucaucuag

SEQ ID NO: 93595 - RNA, 20 nt, Artificial Sequence
  LRRK2 RNA guide
agaagaacuggauguucauc

SEQ ID NO: 93596 - RNA, 20 nt, Artificial Sequence
  LRRK2 RNA guide
agaucuugcuugucuagaug

SEQ ID NO: 93597 - RNA, 20 nt, Artificial Sequence
  LRRK2 RNA guide
agaugaacauccaguucuuc

SEQ ID NO: 93598 - RNA, 20 nt, Artificial Sequence
  LRRK2 RNA guide
aucuagacaagcaagaucug

SEQ ID NO: 93599 - RNA, 20 nt, Artificial Sequence
  LRRK2 RNA guide
aucuugcuugucuagaugaa

SEQ ID NO: 93600 - RNA, 20 nt, Artificial Sequence
  LRRK2 RNA guide
auguucaucuagacaagcaa

SEQ ID NO: 93601 - RNA, 20 nt, Artificial Sequence
  LRRK2 RNA guide
auugagaagaacuggauguu

SEQ ID NO: 93602 - RNA, 20 nt, Artificial Sequence
  LRRK2 RNA guide
cagaucuugcuugucuagau

SEQ ID NO: 93603 - RNA, 20 nt, Artificial Sequence
  LRRK2 RNA guide
caucuagacaagcaagaucu

SEQ ID NO: 93604 - RNA, 20 nt, Artificial Sequence
  LRRK2 RNA guide
ccagaucuugcuugucuaga

SEQ ID NO: 93605 - RNA, 20 nt, Artificial Sequence
  LRRK2 RNA guide
ccuaccagaucuugcuuguc

SEQ ID NO: 93606 - RNA, 20 nt, Artificial Sequence
  LRRK2 RNA guide
cuaccagaucuugcuugucu

SEQ ID NO: 93607 - RNA, 20 nt, Artificial Sequence
  LRRK2 RNA guide
cuagaugaacauccaguucu

SEQ ID NO: 93608 - RNA, 20 nt, Artificial Sequence
  LRRK2 RNA guide
cuggauguucaucuagacaa

SEQ ID NO: 93609 - RNA, 20 nt, Artificial Sequence
  LRRK2 RNA guide
cuugcuugucuagaugaaca

SEQ ID NO: 93610 - RNA, 20 nt, Artificial Sequence
  LRRK2 RNA guide
cuugucuagaugaacaucca

SEQ ID NO: 93611 - RNA, 20 nt, Artificial Sequence
  LRRK2 RNA guide
gaacuggauguucaucuaga

SEQ ID NO: 93612 - RNA, 20 nt, Artificial Sequence
  LRRK2 RNA guide
gaagaacuggauguucaucu

SEQ ID NO: 93613 - RNA, 20 nt, Artificial Sequence
  LRRK2 RNA guide
gagaagaacuggauguucau

SEQ ID NO: 93614 - RNA, 20 nt, Artificial Sequence
  LRRK2 RNA guide
gaucuugcuugucuagauga

SEQ ID NO: 93615 - RNA, 20 nt, Artificial Sequence
  LRRK2 RNA guide
gaugaacauccaguucuucu

SEQ ID NO: 93616 - RNA, 20 nt, Artificial Sequence
  LRRK2 RNA guide
gauguucaucuagacaagca

SEQ ID NO: 93617 - RNA, 20 nt, Artificial Sequence
  LRRK2 RNA guide
gcuugucuagaugaacaucc

SEQ ID NO: 93618 - RNA, 20 nt, Artificial Sequence
  LRRK2 RNA guide
ggauguucaucuagacaagc

SEQ ID NO: 93619 - RNA, 20 nt, Artificial Sequence
  LRRK2 RNA guide
gucuagaugaacauccaguu

SEQ ID NO: 93620 - RNA, 20 nt, Artificial Sequence
  LRRK2 RNA guide
guucaucuagacaagcaaga

SEQ ID NO: 93621 - RNA, 20 nt, Artificial Sequence
  LRRK2 RNA guide
uaauugagaagaacuggaug

SEQ ID NO: 93622 - RNA, 20 nt, Artificial Sequence
  LRRK2 RNA guide
uaccagaucuugcuugucua

SEQ ID NO: 93623 - RNA, 20 nt, Artificial Sequence
  LRRK2 RNA guide
uagaugaacauccaguucuu

SEQ ID NO: 93624 - RNA, 20 nt, Artificial Sequence
  LRRK2 RNA guide
ucaucuagacaagcaagauc

SEQ ID NO: 93625 - RNA, 20 nt, Artificial Sequence
  LRRK2 RNA guide
uccuaccagaucuugcuugu

SEQ ID NO: 93626 - RNA, 20 nt, Artificial Sequence
  LRRK2 RNA guide
ucuagaugaacauccaguuc

SEQ ID NO: 93627 - RNA, 20 nt, Artificial Sequence
  LRRK2 RNA guide
ucuugcuugucuagaugaac

SEQ ID NO: 93628 - RNA, 20 nt, Artificial Sequence
  LRRK2 RNA guide
ugcuugucuagaugaacauc

SEQ ID NO: 93629 - RNA, 20 nt, Artificial Sequence
  LRRK2 RNA guide
uggauguucaucuagacaag

SEQ ID NO: 93630 - RNA, 20 nt, Artificial Sequence
  LRRK2 RNA guide
ugucuagaugaacauccagu

SEQ ID NO: 93631 - RNA, 20 nt, Artificial Sequence
  LRRK2 RNA guide
uguucaucuagacaagcaag

SEQ ID NO: 93632 - RNA, 20 nt, Artificial Sequence
  LRRK2 RNA guide
uucaucuagacaagcaagau

SEQ ID NO: 93633 - RNA, 20 nt, Artificial Sequence
  LRRK2 RNA guide
uugagaagaacuggauguuc

SEQ ID NO: 93634 - RNA, 20 nt, Artificial Sequence
  LRRK2 RNA guide
uugcuugucuagaugaacau

SEQ ID NO: 93635 - RNA, 20 nt, Artificial Sequence
  LRRK2 RNA guide
uugucuagaugaacauccag

SEQ ID NO: 93636 - RNA, 21 nt, Artificial Sequence
  LRRK2 RNA guide
aacuggauguucaucuagaca

SEQ ID NO: 93637 - RNA, 21 nt, Artificial Sequence
  LRRK2 RNA guide
aagaacuggauguucaucuag

SEQ ID NO: 93638 - RNA, 21 nt, Artificial Sequence
  LRRK2 RNA guide
aauugagaagaacuggauguu

SEQ ID NO: 93639 - RNA, 21 nt, Artificial Sequence
  LRRK2 RNA guide
accagaucuugcuugucuaga

SEQ ID NO: 93640 - RNA, 21 nt, Artificial Sequence
  LRRK2 RNA guide
acuggauguucaucuagacaa

SEQ ID NO: 93641 - RNA, 21 nt, Artificial Sequence
  LRRK2 RNA guide
agaacuggauguucaucuaga

SEQ ID NO: 93642 - RNA, 21 nt, Artificial Sequence
  LRRK2 RNA guide
agaagaacuggauguucaucu

SEQ ID NO: 93643 - RNA, 21 nt, Artificial Sequence
  LRRK2 RNA guide
agaucuugcuugucuagauga

SEQ ID NO: 93644 - RNA, 21 nt, Artificial Sequence
  LRRK2 RNA guide
agaugaacauccaguucuucu

SEQ ID NO: 93645 - RNA, 21 nt, Artificial Sequence
  LRRK2 RNA guide
aucuagacaagcaagaucugg

SEQ ID NO: 93646 - RNA, 21 nt, Artificial Sequence
  LRRK2 RNA guide
aucuugcuugucuagaugaac

SEQ ID NO: 93647 - RNA, 21 nt, Artificial Sequence
  LRRK2 RNA guide
auguucaucuagacaagcaag

SEQ ID NO: 93648 - RNA, 21 nt, Artificial Sequence
  LRRK2 RNA guide
auugagaagaacuggauguuc

SEQ ID NO: 93649 - RNA, 21 nt, Artificial Sequence
  LRRK2 RNA guide
cagaucuugcuugucuagaug

SEQ ID NO: 93650 - RNA, 21 nt, Artificial Sequence
  LRRK2 RNA guide
caucuagacaagcaagaucug

SEQ ID NO: 93651 - RNA, 21 nt, Artificial Sequence
  LRRK2 RNA guide
ccagaucuugcuugucuagau

SEQ ID NO: 93652 - RNA, 21 nt, Artificial Sequence
  LRRK2 RNA guide
ccuaccagaucuugcuugucu

SEQ ID NO: 93653 - RNA, 21 nt, Artificial Sequence
  LRRK2 RNA guide
cuaccagaucuugcuugucua

SEQ ID NO: 93654 - RNA, 21 nt, Artificial Sequence
  LRRK2 RNA guide
cuagaugaacauccaguucuu

SEQ ID NO: 93655 - RNA, 21 nt, Artificial Sequence
  LRRK2 RNA guide
cuggauguucaucuagacaag

SEQ ID NO: 93656 - RNA, 21 nt, Artificial Sequence
  LRRK2 RNA guide
cuugcuugucuagaugaacau

SEQ ID NO: 93657 - RNA, 21 nt, Artificial Sequence
  LRRK2 RNA guide
cuugucuagaugaacauccag

SEQ ID NO: 93658 - RNA, 21 nt, Artificial Sequence
  LRRK2 RNA guide
gaacuggauguucaucuagac

SEQ ID NO: 93659 - RNA, 21 nt, Artificial Sequence
  LRRK2 RNA guide
gaagaacuggauguucaucua

SEQ ID NO: 93660 - RNA, 21 nt, Artificial Sequence
  LRRK2 RNA guide
gagaagaacuggauguucauc

SEQ ID NO: 93661 - RNA, 21 nt, Artificial Sequence
  LRRK2 RNA guide
gaucuugcuugucuagaugaa

SEQ ID NO: 93662 - RNA, 21 nt, Artificial Sequence
  LRRK2 RNA guide
gaugaacauccaguucuucuc

SEQ ID NO: 93663 - RNA, 21 nt, Artificial Sequence
  LRRK2 RNA guide
gauguucaucuagacaagcaa

SEQ ID NO: 93664 - RNA, 21 nt, Artificial Sequence
  LRRK2 RNA guide
gcuugucuagaugaacaucca

SEQ ID NO: 93665 - RNA, 21 nt, Artificial Sequence
  LRRK2 RNA guide
ggauguucaucuagacaagca

SEQ ID NO: 93666 - RNA, 21 nt, Artificial Sequence
  LRRK2 RNA guide
guaauugagaagaacuggaug

SEQ ID NO: 93667 - RNA, 21 nt, Artificial Sequence
  LRRK2 RNA guide
gucuagaugaacauccaguuc

SEQ ID NO: 93668 - RNA, 21 nt, Artificial Sequence
  LRRK2 RNA guide
guucaucuagacaagcaagau

SEQ ID NO: 93669 - RNA, 21 nt, Artificial Sequence
  LRRK2 RNA guide
uaauugagaagaacuggaugu

SEQ ID NO: 93670 - RNA, 21 nt, Artificial Sequence
  LRRK2 RNA guide
uaccagaucuugcuugucuag

SEQ ID NO: 93671 - RNA, 21 nt, Artificial Sequence
  LRRK2 RNA guide
uagaugaacauccaguucuuc

SEQ ID NO: 93672 - RNA, 21 nt, Artificial Sequence
  LRRK2 RNA guide
ucaucuagacaagcaagaucu

SEQ ID NO: 93673 - RNA, 21 nt, Artificial Sequence
  LRRK2 RNA guide
uccuaccagaucuugcuuguc

SEQ ID NO: 93674 - RNA, 21 nt, Artificial Sequence
  LRRK2 RNA guide
ucuagaugaacauccaguucu

SEQ ID NO: 93675 - RNA, 21 nt, Artificial Sequence
  LRRK2 RNA guide
ucuugcuugucuagaugaaca

SEQ ID NO: 93676 - RNA, 21 nt, Artificial Sequence
  LRRK2 RNA guide
ugagaagaacuggauguucau

SEQ ID NO: 93677 - RNA, 21 nt, Artificial Sequence
  LRRK2 RNA guide
ugcuugucuagaugaacaucc

SEQ ID NO: 93678 - RNA, 21 nt, Artificial Sequence
  LRRK2 RNA guide
uggauguucaucuagacaagc

SEQ ID NO: 93679 - RNA, 21 nt, Artificial Sequence
  LRRK2 RNA guide
ugucuagaugaacauccaguu

SEQ ID NO: 93680 - RNA, 21 nt, Artificial Sequence
  LRRK2 RNA guide
uguucaucuagacaagcaaga

SEQ ID NO: 93681 - RNA, 21 nt, Artificial Sequence
  LRRK2 RNA guide
uucaucuagacaagcaagauc

SEQ ID NO: 93682 - RNA, 21 nt, Artificial Sequence
  LRRK2 RNA guide
uuccuaccagaucuugcuugu

SEQ ID NO: 93683 - RNA, 21 nt, Artificial Sequence
  LRRK2 RNA guide
uugagaagaacuggauguuca

SEQ ID NO: 93684 - RNA, 21 nt, Artificial Sequence
  LRRK2 RNA guide
uugcuugucuagaugaacauc

SEQ ID NO: 93685 - RNA, 21 nt, Artificial Sequence
  LRRK2 RNA guide
uugucuagaugaacauccagu

SEQ ID NO: 93686 - RNA, 22 nt, Artificial Sequence
  LRRK2 RNA guide
aacuggauguucaucuagacaa

SEQ ID NO: 93687 - RNA, 22 nt, Artificial Sequence
  LRRK2 RNA guide
aagaacuggauguucaucuaga

SEQ ID NO: 93688 - RNA, 22 nt, Artificial Sequence
  LRRK2 RNA guide
aauugagaagaacuggauguuc

SEQ ID NO: 93689 - RNA, 22 nt, Artificial Sequence
  LRRK2 RNA guide
accagaucuugcuugucuagau

SEQ ID NO: 93690 - RNA, 22 nt, Artificial Sequence
  LRRK2 RNA guide
acuggauguucaucuagacaag

SEQ ID NO: 93691 - RNA, 22 nt, Artificial Sequence
  LRRK2 RNA guide
agaacuggauguucaucuagac

SEQ ID NO: 93692 - RNA, 22 nt, Artificial Sequence
  LRRK2 RNA guide
agaagaacuggauguucaucua

SEQ ID NO: 93693 - RNA, 22 nt, Artificial Sequence
  LRRK2 RNA guide
agaucuugcuugucuagaugaa

SEQ ID NO: 93694 - RNA, 22 nt, Artificial Sequence
  LRRK2 RNA guide
agaugaacauccaguucuucuc

SEQ ID NO: 93695 - RNA, 22 nt, Artificial Sequence
  LRRK2 RNA guide
aguaauugagaagaacuggaug

SEQ ID NO: 93696 - RNA, 22 nt, Artificial Sequence
  LRRK2 RNA guide
aucuagacaagcaagaucuggu

SEQ ID NO: 93697 - RNA, 22 nt, Artificial Sequence
  LRRK2 RNA guide
aucuugcuugucuagaugaaca

SEQ ID NO: 93698 - RNA, 22 nt, Artificial Sequence
  LRRK2 RNA guide
auguucaucuagacaagcaaga

SEQ ID NO: 93699 - RNA, 22 nt, Artificial Sequence
  LRRK2 RNA guide
auuccuaccagaucuugcuugu

SEQ ID NO: 93700 - RNA, 22 nt, Artificial Sequence
  LRRK2 RNA guide
auugagaagaacuggauguuca

SEQ ID NO: 93701 - RNA, 22 nt, Artificial Sequence
  LRRK2 RNA guide
cagaucuugcuugucuagauga

SEQ ID NO: 93702 - RNA, 22 nt, Artificial Sequence
  LRRK2 RNA guide
caucuagacaagcaagaucugg

SEQ ID NO: 93703 - RNA, 22 nt, Artificial Sequence
  LRRK2 RNA guide
ccagaucuugcuugucuagaug

SEQ ID NO: 93704 - RNA, 22 nt, Artificial Sequence
  LRRK2 RNA guide
ccuaccagaucuugcuugucua

SEQ ID NO: 93705 - RNA, 22 nt, Artificial Sequence
  LRRK2 RNA guide
cuaccagaucuugcuugucuag

SEQ ID NO: 93706 - RNA, 22 nt, Artificial Sequence
  LRRK2 RNA guide
cuagaugaacauccaguucuuc

SEQ ID NO: 93707 - RNA, 22 nt, Artificial Sequence
  LRRK2 RNA guide
cuggauguucaucuagacaagc

SEQ ID NO: 93708 - RNA, 22 nt, Artificial Sequence
  LRRK2 RNA guide
cuugcuugucuagaugaacauc

SEQ ID NO: 93709 - RNA, 22 nt, Artificial Sequence
  LRRK2 RNA guide
cuugucuagaugaacauccagu

SEQ ID NO: 93710 - RNA, 22 nt, Artificial Sequence
  LRRK2 RNA guide
gaacuggauguucaucuagaca

SEQ ID NO: 93711 - RNA, 22 nt, Artificial Sequence
  LRRK2 RNA guide
gaagaacuggauguucaucuag

SEQ ID NO: 93712 - RNA, 22 nt, Artificial Sequence
  LRRK2 RNA guide
gagaagaacuggauguucaucu

SEQ ID NO: 93713 - RNA, 22 nt, Artificial Sequence
  LRRK2 RNA guide
gaucuugcuugucuagaugaac

SEQ ID NO: 93714 - RNA, 22 nt, Artificial Sequence
  LRRK2 RNA guide
gaugaacauccaguucuucuca

SEQ ID NO: 93715 - RNA, 22 nt, Artificial Sequence
  LRRK2 RNA guide
gauguucaucuagacaagcaag

SEQ ID NO: 93716 - RNA, 22 nt, Artificial Sequence
  LRRK2 RNA guide
gcuugucuagaugaacauccag

SEQ ID NO: 93717 - RNA, 22 nt, Artificial Sequence
  LRRK2 RNA guide
ggauguucaucuagacaagcaa

SEQ ID NO: 93718 - RNA, 22 nt, Artificial Sequence
  LRRK2 RNA guide
guaauugagaagaacuggaugu

SEQ ID NO: 93719 - RNA, 22 nt, Artificial Sequence
  LRRK2 RNA guide
gucuagaugaacauccaguucu

SEQ ID NO: 93720 - RNA, 22 nt, Artificial Sequence
  LRRK2 RNA guide
guucaucuagacaagcaagauc

SEQ ID NO: 93721 - RNA, 22 nt, Artificial Sequence
  LRRK2 RNA guide
uaauugagaagaacuggauguu

SEQ ID NO: 93722 - RNA, 22 nt, Artificial Sequence
  LRRK2 RNA guide
uaccagaucuugcuugucuaga

SEQ ID NO: 93723 - RNA, 22 nt, Artificial Sequence
  LRRK2 RNA guide
uagaugaacauccaguucuucu

SEQ ID NO: 93724 - RNA, 22 nt, Artificial Sequence
  LRRK2 RNA guide
ucaucuagacaagcaagaucug

SEQ ID NO: 93725 - RNA, 22 nt, Artificial Sequence
  LRRK2 RNA guide
uccuaccagaucuugcuugucu

SEQ ID NO: 93726 - RNA, 22 nt, Artificial Sequence
  LRRK2 RNA guide
ucuagaugaacauccaguucuu

SEQ ID NO: 93727 - RNA, 22 nt, Artificial Sequence
  LRRK2 RNA guide
ucuugcuugucuagaugaacau

SEQ ID NO: 93728 - RNA, 22 nt, Artificial Sequence
  LRRK2 RNA guide
ugagaagaacuggauguucauc

SEQ ID NO: 93729 - RNA, 22 nt, Artificial Sequence
  LRRK2 RNA guide
ugcuugucuagaugaacaucca

SEQ ID NO: 93730 - RNA, 22 nt, Artificial Sequence
  LRRK2 RNA guide
uggauguucaucuagacaagca

SEQ ID NO: 93731 - RNA, 22 nt, Artificial Sequence
  LRRK2 RNA guide
ugucuagaugaacauccaguuc

SEQ ID NO: 93732 - RNA, 22 nt, Artificial Sequence
  LRRK2 RNA guide
uguucaucuagacaagcaagau

SEQ ID NO: 93733 - RNA, 22 nt, Artificial Sequence
  LRRK2 RNA guide
uucaucuagacaagcaagaucu

SEQ ID NO: 93734 - RNA, 22 nt, Artificial Sequence
  LRRK2 RNA guide
uuccuaccagaucuugcuuguc

SEQ ID NO: 93735 - RNA, 22 nt, Artificial Sequence
  LRRK2 RNA guide
uugagaagaacuggauguucau

SEQ ID NO: 93736 - RNA, 22 nt, Artificial Sequence
  LRRK2 RNA guide
uugcuugucuagaugaacaucc

SEQ ID NO: 93737 - RNA, 22 nt, Artificial Sequence
  LRRK2 RNA guide
uugucuagaugaacauccaguu

SEQ ID NO: 93738 - RNA, 20 nt, Artificial Sequence
  LRRK2 RNA guide
aacuggauguucaccuagac

SEQ ID NO: 93739 - RNA, 20 nt, Artificial Sequence
  LRRK2 RNA guide
aagaacuggauguucaccua

SEQ ID NO: 93740 - RNA, 20 nt, Artificial Sequence
  LRRK2 RNA guide
accuagacaagcaagaucug

SEQ ID NO: 93741 - RNA, 20 nt, Artificial Sequence
  LRRK2 RNA guide
acuggauguucaccuagaca

SEQ ID NO: 93742 - RNA, 20 nt, Artificial Sequence
  LRRK2 RNA guide
agaacuggauguucaccuag

SEQ ID NO: 93743 - RNA, 20 nt, Artificial Sequence
  LRRK2 RNA guide
agaagaacuggauguucacc

SEQ ID NO: 93744 - RNA, 20 nt, Artificial Sequence
  LRRK2 RNA guide
agaucuugcuugucuaggug

SEQ ID NO: 93745 - RNA, 20 nt, Artificial Sequence
  LRRK2 RNA guide
aggugaacauccaguucuuc

SEQ ID NO: 93746 - RNA, 20 nt, Artificial Sequence
  LRRK2 RNA guide
aucuugcuugucuaggugaa

SEQ ID NO: 93747 - RNA, 20 nt, Artificial Sequence
  LRRK2 RNA guide
auguucaccuagacaagcaa

SEQ ID NO: 93748 - RNA, 20 nt, Artificial Sequence
  LRRK2 RNA guide
caccuagacaagcaagaucu

SEQ ID NO: 93749 - RNA, 20 nt, Artificial Sequence
  LRRK2 RNA guide
cagaucuugcuugucuaggu

SEQ ID NO: 93750 - RNA, 20 nt, Artificial Sequence
  LRRK2 RNA guide
ccagaucuugcuugucuagg

SEQ ID NO: 93751 - RNA, 20 nt, Artificial Sequence
  LRRK2 RNA guide
cuaggugaacauccaguucu

SEQ ID NO: 93752 - RNA, 20 nt, Artificial Sequence
  LRRK2 RNA guide
cuggauguucaccuagacaa

SEQ ID NO: 93753 - RNA, 20 nt, Artificial Sequence
  LRRK2 RNA guide
cuugcuugucuaggugaaca

SEQ ID NO: 93754 - RNA, 20 nt, Artificial Sequence
  LRRK2 RNA guide
cuugucuaggugaacaucca

SEQ ID NO: 93755 - RNA, 20 nt, Artificial Sequence
  LRRK2 RNA guide
gaacuggauguucaccuaga

SEQ ID NO: 93756 - RNA, 20 nt, Artificial Sequence
  LRRK2 RNA guide
gaagaacuggauguucaccu

SEQ ID NO: 93757 - RNA, 20 nt, Artificial Sequence
  LRRK2 RNA guide
gagaagaacuggauguucac

SEQ ID NO: 93758 - RNA, 20 nt, Artificial Sequence
  LRRK2 RNA guide
gaucuugcuugucuagguga

SEQ ID NO: 93759 - RNA, 20 nt, Artificial Sequence
  LRRK2 RNA guide
gauguucaccuagacaagca

SEQ ID NO: 93760 - RNA, 20 nt, Artificial Sequence
  LRRK2 RNA guide
gcuugucuaggugaacaucc

SEQ ID NO: 93761 - RNA, 20 nt, Artificial Sequence
  LRRK2 RNA guide
ggauguucaccuagacaagc

SEQ ID NO: 93762 - RNA, 20 nt, Artificial Sequence
  LRRK2 RNA guide
ggugaacauccaguucuucu

SEQ ID NO: 93763 - RNA, 20 nt, Artificial Sequence
  LRRK2 RNA guide
gucuaggugaacauccaguu

SEQ ID NO: 93764 - RNA, 20 nt, Artificial Sequence
  LRRK2 RNA guide
guucaccuagacaagcaaga

SEQ ID NO: 93765 - RNA, 20 nt, Artificial Sequence
  LRRK2 RNA guide
uaggugaacauccaguucuu

SEQ ID NO: 93766 - RNA, 20 nt, Artificial Sequence
  LRRK2 RNA guide
ucaccuagacaagcaagauc

SEQ ID NO: 93767 - RNA, 20 nt, Artificial Sequence
  LRRK2 RNA guide
ucuaggugaacauccaguuc

SEQ ID NO: 93768 - RNA, 20 nt, Artificial Sequence
  LRRK2 RNA guide
ucuugcuugucuaggugaac

SEQ ID NO: 93769 - RNA, 20 nt, Artificial Sequence
  LRRK2 RNA guide
ugcuugucuaggugaacauc

SEQ ID NO: 93770 - RNA, 20 nt, Artificial Sequence
  LRRK2 RNA guide
uggauguucaccuagacaag

SEQ ID NO: 93771 - RNA, 20 nt, Artificial Sequence
  LRRK2 RNA guide
ugucuaggugaacauccagu

SEQ ID NO: 93772 - RNA, 20 nt, Artificial Sequence
  LRRK2 RNA guide
uguucaccuagacaagcaag

SEQ ID NO: 93773 - RNA, 20 nt, Artificial Sequence
  LRRK2 RNA guide
uucaccuagacaagcaagau

SEQ ID NO: 93774 - RNA, 20 nt, Artificial Sequence
  LRRK2 RNA guide
uugcuugucuaggugaacau

SEQ ID NO: 93775 - RNA, 20 nt, Artificial Sequence
  LRRK2 RNA guide
uugucuaggugaacauccag

SEQ ID NO: 93776 - RNA, 21 nt, Artificial Sequence
  LRRK2 RNA guide
aacuggauguucaccuagaca

SEQ ID NO: 93777 - RNA, 21 nt, Artificial Sequence
  LRRK2 RNA guide
aagaacuggauguucaccuag

SEQ ID NO: 93778 - RNA, 21 nt, Artificial Sequence
  LRRK2 RNA guide
accagaucuugcuugucuagg

SEQ ID NO: 93779 - RNA, 21 nt, Artificial Sequence
  LRRK2 RNA guide
accuagacaagcaagaucugg

SEQ ID NO: 93780 - RNA, 21 nt, Artificial Sequence
  LRRK2 RNA guide
acuggauguucaccuagacaa

SEQ ID NO: 93781 - RNA, 21 nt, Artificial Sequence
  LRRK2 RNA guide
agaacuggauguucaccuaga

SEQ ID NO: 93782 - RNA, 21 nt, Artificial Sequence
  LRRK2 RNA guide
agaagaacuggauguucaccu

SEQ ID NO: 93783 - RNA, 21 nt, Artificial Sequence
  LRRK2 RNA guide
agaucuugcuugucuagguga

SEQ ID NO: 93784 - RNA, 21 nt, Artificial Sequence
  LRRK2 RNA guide
aggugaacauccaguucuucu

SEQ ID NO: 93785 - RNA, 21 nt, Artificial Sequence
  LRRK2 RNA guide
aucuugcuugucuaggugaac

SEQ ID NO: 93786 - RNA, 21 nt, Artificial Sequence
  LRRK2 RNA guide
auguucaccuagacaagcaag

SEQ ID NO: 93787 - RNA, 21 nt, Artificial Sequence
  LRRK2 RNA guide
caccuagacaagcaagaucug

SEQ ID NO: 93788 - RNA, 21 nt, Artificial Sequence
  LRRK2 RNA guide
cagaucuugcuugucuaggug

SEQ ID NO: 93789 - RNA, 21 nt, Artificial Sequence
  LRRK2 RNA guide
ccagaucuugcuugucuaggu

SEQ ID NO: 93790 - RNA, 21 nt, Artificial Sequence
  LRRK2 RNA guide
cuaggugaacauccaguucuu

SEQ ID NO: 93791 - RNA, 21 nt, Artificial Sequence
  LRRK2 RNA guide
cuggauguucaccuagacaag

SEQ ID NO: 93792 - RNA, 21 nt, Artificial Sequence
  LRRK2 RNA guide
cuugcuugucuaggugaacau

SEQ ID NO: 93793 - RNA, 21 nt, Artificial Sequence
  LRRK2 RNA guide
cuugucuaggugaacauccag

SEQ ID NO: 93794 - RNA, 21 nt, Artificial Sequence
  LRRK2 RNA guide
gaacuggauguucaccuagac

SEQ ID NO: 93795 - RNA, 21 nt, Artificial Sequence
  LRRK2 RNA guide
gaagaacuggauguucaccua

SEQ ID NO: 93796 - RNA, 21 nt, Artificial Sequence
  LRRK2 RNA guide
gagaagaacuggauguucacc

SEQ ID NO: 93797 - RNA, 21 nt, Artificial Sequence
  LRRK2 RNA guide
gaucuugcuugucuaggugaa

SEQ ID NO: 93798 - RNA, 21 nt, Artificial Sequence
  LRRK2 RNA guide
gauguucaccuagacaagcaa

SEQ ID NO: 93799 - RNA, 21 nt, Artificial Sequence
  LRRK2 RNA guide
gcuugucuaggugaacaucca

SEQ ID NO: 93800 - RNA, 21 nt, Artificial Sequence
  LRRK2 RNA guide
ggauguucaccuagacaagca

SEQ ID NO: 93801 - RNA, 21 nt, Artificial Sequence
  LRRK2 RNA guide
ggugaacauccaguucuucuc

SEQ ID NO: 93802 - RNA, 21 nt, Artificial Sequence
  LRRK2 RNA guide
gucuaggugaacauccaguuc

SEQ ID NO: 93803 - RNA, 21 nt, Artificial Sequence
  LRRK2 RNA guide
guucaccuagacaagcaagau

SEQ ID NO: 93804 - RNA, 21 nt, Artificial Sequence
  LRRK2 RNA guide
uaggugaacauccaguucuuc

SEQ ID NO: 93805 - RNA, 21 nt, Artificial Sequence
  LRRK2 RNA guide
ucaccuagacaagcaagaucu

SEQ ID NO: 93806 - RNA, 21 nt, Artificial Sequence
  LRRK2 RNA guide
ucuaggugaacauccaguucu

SEQ ID NO: 93807 - RNA, 21 nt, Artificial Sequence
  LRRK2 RNA guide
ucuugcuugucuaggugaaca

SEQ ID NO: 93808 - RNA, 21 nt, Artificial Sequence
  LRRK2 RNA guide
ugagaagaacuggauguucac

SEQ ID NO: 93809 - RNA, 21 nt, Artificial Sequence
  LRRK2 RNA guide
ugcuugucuaggugaacaucc

SEQ ID NO: 93810 - RNA, 21 nt, Artificial Sequence
  LRRK2 RNA guide
uggauguucaccuagacaagc

SEQ ID NO: 93811 - RNA, 21 nt, Artificial Sequence
  LRRK2 RNA guide
ugucuaggugaacauccaguu

SEQ ID NO: 93812 - RNA, 21 nt, Artificial Sequence
  LRRK2 RNA guide
uguucaccuagacaagcaaga

SEQ ID NO: 93813 - RNA, 21 nt, Artificial Sequence
  LRRK2 RNA guide
uucaccuagacaagcaagauc

SEQ ID NO: 93814 - RNA, 21 nt, Artificial Sequence
  LRRK2 RNA guide
uugcuugucuaggugaacauc

SEQ ID NO: 93815 - RNA, 21 nt, Artificial Sequence
  LRRK2 RNA guide
uugucuaggugaacauccagu

SEQ ID NO: 93816 - RNA, 22 nt, Artificial Sequence
  LRRK2 RNA guide
aacuggauguucaccuagacaa

SEQ ID NO: 93817 - RNA, 22 nt, Artificial Sequence
  LRRK2 RNA guide
aagaacuggauguucaccuaga

SEQ ID NO: 93818 - RNA, 22 nt, Artificial Sequence
  LRRK2 RNA guide
accagaucuugcuugucuaggu

SEQ ID NO: 93819 - RNA, 22 nt, Artificial Sequence
  LRRK2 RNA guide
accuagacaagcaagaucuggu

SEQ ID NO: 93820 - RNA, 22 nt, Artificial Sequence
  LRRK2 RNA guide
acuggauguucaccuagacaag

SEQ ID NO: 93821 - RNA, 22 nt, Artificial Sequence
  LRRK2 RNA guide
agaacuggauguucaccuagac

SEQ ID NO: 93822 - RNA, 22 nt, Artificial Sequence
  LRRK2 RNA guide
agaagaacuggauguucaccua

SEQ ID NO: 93823 - RNA, 22 nt, Artificial Sequence
  LRRK2 RNA guide
agaucuugcuugucuaggugaa

SEQ ID NO: 93824 - RNA, 22 nt, Artificial Sequence
  LRRK2 RNA guide
aggugaacauccaguucuucuc

SEQ ID NO: 93825 - RNA, 22 nt, Artificial Sequence
  LRRK2 RNA guide
aucuugcuugucuaggugaaca

SEQ ID NO: 93826 - RNA, 22 nt, Artificial Sequence
  LRRK2 RNA guide
auguucaccuagacaagcaaga

SEQ ID NO: 93827 - RNA, 22 nt, Artificial Sequence
  LRRK2 RNA guide
caccuagacaagcaagaucugg

SEQ ID NO: 93828 - RNA, 22 nt, Artificial Sequence
  LRRK2 RNA guide
cagaucuugcuugucuagguga

SEQ ID NO: 93829 - RNA, 22 nt, Artificial Sequence
  LRRK2 RNA guide
ccagaucuugcuugucuaggug

SEQ ID NO: 93830 - RNA, 22 nt, Artificial Sequence
  LRRK2 RNA guide
cuaggugaacauccaguucuuc

SEQ ID NO: 93831 - RNA, 22 nt, Artificial Sequence
  LRRK2 RNA guide
cuggauguucaccuagacaagc

SEQ ID NO: 93832 - RNA, 22 nt, Artificial Sequence
  LRRK2 RNA guide
cuugcuugucuaggugaacauc

SEQ ID NO: 93833 - RNA, 22 nt, Artificial Sequence
  LRRK2 RNA guide
cuugucuaggugaacauccagu

SEQ ID NO: 93834 - RNA, 22 nt, Artificial Sequence
  LRRK2 RNA guide
gaacuggauguucaccuagaca

SEQ ID NO: 93835 - RNA, 22 nt, Artificial Sequence
  LRRK2 RNA guide
gaagaacuggauguucaccuag

SEQ ID NO: 93836 - RNA, 22 nt, Artificial Sequence
  LRRK2 RNA guide
gagaagaacuggauguucaccu

SEQ ID NO: 93837 - RNA, 22 nt, Artificial Sequence
  LRRK2 RNA guide
gaucuugcuugucuaggugaac

SEQ ID NO: 93838 - RNA, 22 nt, Artificial Sequence
  LRRK2 RNA guide
gauguucaccuagacaagcaag

SEQ ID NO: 93839 - RNA, 22 nt, Artificial Sequence
  LRRK2 RNA guide
gcuugucuaggugaacauccag

SEQ ID NO: 93840 - RNA, 22 nt, Artificial Sequence
  LRRK2 RNA guide
ggauguucaccuagacaagcaa

SEQ ID NO: 93841 - RNA, 22 nt, Artificial Sequence
  LRRK2 RNA guide
ggugaacauccaguucuucuca

SEQ ID NO: 93842 - RNA, 22 nt, Artificial Sequence
  LRRK2 RNA guide
gucuaggugaacauccaguucu

SEQ ID NO: 93843 - RNA, 22 nt, Artificial Sequence
  LRRK2 RNA guide
guucaccuagacaagcaagauc

SEQ ID NO: 93844 - RNA, 22 nt, Artificial Sequence
  LRRK2 RNA guide
uaccagaucuugcuugucuagg

SEQ ID NO: 93845 - RNA, 22 nt, Artificial Sequence
  LRRK2 RNA guide
uaggugaacauccaguucuucu

SEQ ID NO: 93846 - RNA, 22 nt, Artificial Sequence
  LRRK2 RNA guide
ucaccuagacaagcaagaucug

SEQ ID NO: 93847 - RNA, 22 nt, Artificial Sequence
  LRRK2 RNA guide
ucuaggugaacauccaguucuu

SEQ ID NO: 93848 - RNA, 22 nt, Artificial Sequence
  LRRK2 RNA guide
ucuugcuugucuaggugaacau

SEQ ID NO: 93849 - RNA, 22 nt, Artificial Sequence
  LRRK2 RNA guide
ugagaagaacuggauguucacc

SEQ ID NO: 93850 - RNA, 22 nt, Artificial Sequence
  LRRK2 RNA guide
ugcuugucuaggugaacaucca

SEQ ID NO: 93851 - RNA, 22 nt, Artificial Sequence
  LRRK2 RNA guide
uggauguucaccuagacaagca

SEQ ID NO: 93852 - RNA, 22 nt, Artificial Sequence
  LRRK2 RNA guide
ugucuaggugaacauccaguuc

SEQ ID NO: 93853 - RNA, 22 nt, Artificial Sequence
  LRRK2 RNA guide
uguucaccuagacaagcaagau

SEQ ID NO: 93854 - RNA, 22 nt, Artificial Sequence
  LRRK2 RNA guide
uucaccuagacaagcaagaucu

SEQ ID NO: 93855 - RNA, 22 nt, Artificial Sequence
  LRRK2 RNA guide
uugagaagaacuggauguucac

SEQ ID NO: 93856 - RNA, 22 nt, Artificial Sequence
  LRRK2 RNA guide
uugcuugucuaggugaacaucc

SEQ ID NO: 93857 - RNA, 22 nt, Artificial Sequence
  LRRK2 RNA guide
uugucuaggugaacauccaguu

SEQ ID NO: 93858 - RNA, 20 nt, Artificial Sequence
  LRRK2 RNA guide
augucuaaguucuuuacacu

SEQ ID NO: 93859 - RNA, 20 nt, Artificial Sequence
  LRRK2 RNA guide
caggaauuuuaauugguagu

SEQ ID NO: 93860 - RNA, 20 nt, Artificial Sequence
  LRRK2 RNA guide
cuuuacacuauaaacuacca

SEQ ID NO: 93861 - RNA, 20 nt, Artificial Sequence
  LRRK2 RNA guide
gguaguuuauaguguaaaga

SEQ ID NO: 93862 - RNA, 20 nt, Artificial Sequence
  LRRK2 RNA guide
gucuaaguucuuuacacuau

SEQ ID NO: 93863 - RNA, 20 nt, Artificial Sequence
  LRRK2 RNA guide
uaugucuaaguucuuuacac

SEQ ID NO: 93864 - RNA, 20 nt, Artificial Sequence
  LRRK2 RNA guide
ucaggaauuuuaauugguag

SEQ ID NO: 93865 - RNA, 20 nt, Artificial Sequence
  LRRK2 RNA guide
ucuuuacacuauaaacuacc

SEQ ID NO: 93866 - RNA, 20 nt, Artificial Sequence
  LRRK2 RNA guide
ugguaguuuauaguguaaag

SEQ ID NO: 93867 - RNA, 20 nt, Artificial Sequence
  LRRK2 RNA guide
ugucuaaguucuuuacacua

SEQ ID NO: 93868 - RNA, 22 nt, Artificial Sequence
  LRRK2 RNA guide
gguaguuuauaguguaaagaac

SEQ ID NO: 93869 - RNA, 22 nt, Artificial Sequence
  LRRK2 RNA guide
guucuuuacacuauaaacuacc

SEQ ID NO: 93870 - RNA, 20 nt, Artificial Sequence
  LRRK2 RNA guide
aaguucuuuacacuacaaac

SEQ ID NO: 93871 - RNA, 20 nt, Artificial Sequence
  LRRK2 RNA guide
aauugguaguuuguagugua

SEQ ID NO: 93872 - RNA, 20 nt, Artificial Sequence
  LRRK2 RNA guide
acacuacaaacuaccaauua

SEQ ID NO: 93873 - RNA, 20 nt, Artificial Sequence
  LRRK2 RNA guide
aguucuuuacacuacaaacu

SEQ ID NO: 93874 - RNA, 20 nt, Artificial Sequence
  LRRK2 RNA guide
aguuuguaguguaaagaacu

SEQ ID NO: 93875 - RNA, 20 nt, Artificial Sequence
  LRRK2 RNA guide
auugguaguuuguaguguaa

SEQ ID NO: 93876 - RNA, 20 nt, Artificial Sequence
  LRRK2 RNA guide
cacuacaaacuaccaauuaa

SEQ ID NO: 93877 - RNA, 20 nt, Artificial Sequence
  LRRK2 RNA guide
cuaaguucuuuacacuacaa

SEQ ID NO: 93878 - RNA, 20 nt, Artificial Sequence
  LRRK2 RNA guide
cuuuacacuacaaacuacca

SEQ ID NO: 93879 - RNA, 20 nt, Artificial Sequence
  LRRK2 RNA guide
gguaguuuguaguguaaaga

SEQ ID NO: 93880 - RNA, 20 nt, Artificial Sequence
  LRRK2 RNA guide
guaguuuguaguguaaagaa

SEQ ID NO: 93881 - RNA, 20 nt, Artificial Sequence
  LRRK2 RNA guide
gucuaaguucuuuacacuac

SEQ ID NO: 93882 - RNA, 20 nt, Artificial Sequence
  LRRK2 RNA guide
guucuuuacacuacaaacua

SEQ ID NO: 93883 - RNA, 20 nt, Artificial Sequence
  LRRK2 RNA guide
guuuguaguguaaagaacuu

SEQ ID NO: 93884 - RNA, 20 nt, Artificial Sequence
  LRRK2 RNA guide
uaauugguaguuuguagugu

SEQ ID NO: 93885 - RNA, 20 nt, Artificial Sequence
  LRRK2 RNA guide
uacacuacaaacuaccaauu

SEQ ID NO: 93886 - RNA, 20 nt, Artificial Sequence
  LRRK2 RNA guide
uaguuuguaguguaaagaac

SEQ ID NO: 93887 - RNA, 20 nt, Artificial Sequence
  LRRK2 RNA guide
ucuaaguucuuuacacuaca

SEQ ID NO: 93888 - RNA, 20 nt, Artificial Sequence
  LRRK2 RNA guide
ucuuuacacuacaaacuacc

SEQ ID NO: 93889 - RNA, 20 nt, Artificial Sequence
  LRRK2 RNA guide
ugguaguuuguaguguaaag

SEQ ID NO: 93890 - RNA, 20 nt, Artificial Sequence
  LRRK2 RNA guide
uguaguguaaagaacuuaga

SEQ ID NO: 93891 - RNA, 20 nt, Artificial Sequence
  LRRK2 RNA guide
uuaauugguaguuuguagug

SEQ ID NO: 93892 - RNA, 20 nt, Artificial Sequence
  LRRK2 RNA guide
uuacacuacaaacuaccaau

SEQ ID NO: 93893 - RNA, 20 nt, Artificial Sequence
  LRRK2 RNA guide
uucuuuacacuacaaacuac

SEQ ID NO: 93894 - RNA, 20 nt, Artificial Sequence
  LRRK2 RNA guide
uugguaguuuguaguguaaa

SEQ ID NO: 93895 - RNA, 20 nt, Artificial Sequence
  LRRK2 RNA guide
uuguaguguaaagaacuuag

SEQ ID NO: 93896 - RNA, 20 nt, Artificial Sequence
  LRRK2 RNA guide
uuuacacuacaaacuaccaa

SEQ ID NO: 93897 - RNA, 21 nt, Artificial Sequence
  LRRK2 RNA guide
cuuuacacuacaaacuaccaa

SEQ ID NO: 93898 - RNA, 21 nt, Artificial Sequence
  LRRK2 RNA guide
gguaguuuguaguguaaagaa

SEQ ID NO: 93899 - RNA, 21 nt, Artificial Sequence
  LRRK2 RNA guide
guaguuuguaguguaaagaac

SEQ ID NO: 93900 - RNA, 21 nt, Artificial Sequence
  LRRK2 RNA guide
gucuaaguucuuuacacuaca

SEQ ID NO: 93901 - RNA, 21 nt, Artificial Sequence
  LRRK2 RNA guide
guucuuuacacuacaaacuac

SEQ ID NO: 93902 - RNA, 21 nt, Artificial Sequence
  LRRK2 RNA guide
ucuuuacacuacaaacuacca

SEQ ID NO: 93903 - RNA, 21 nt, Artificial Sequence
  LRRK2 RNA guide
ugguaguuuguaguguaaaga

SEQ ID NO: 93904 - RNA, 21 nt, Artificial Sequence
  LRRK2 RNA guide
uguaguguaaagaacuuagac

SEQ ID NO: 93905 - RNA, 21 nt, Artificial Sequence
  LRRK2 RNA guide
ugucuaaguucuuuacacuac

SEQ ID NO: 93906 - RNA, 21 nt, Artificial Sequence
  LRRK2 RNA guide
uucuuuacacuacaaacuacc

SEQ ID NO: 93907 - RNA, 21 nt, Artificial Sequence
  LRRK2 RNA guide
uugguaguuuguaguguaaag

SEQ ID NO: 93908 - RNA, 22 nt, Artificial Sequence
  LRRK2 RNA guide
aguucuuuacacuacaaacuac

SEQ ID NO: 93909 - RNA, 22 nt, Artificial Sequence
  LRRK2 RNA guide
augucuaaguucuuuacacuac

SEQ ID NO: 93910 - RNA, 22 nt, Artificial Sequence
  LRRK2 RNA guide
auugguaguuuguaguguaaag

SEQ ID NO: 93911 - RNA, 22 nt, Artificial Sequence
  LRRK2 RNA guide
cuaaguucuuuacacuacaaac

SEQ ID NO: 93912 - RNA, 22 nt, Artificial Sequence
  LRRK2 RNA guide
cuuuacacuacaaacuaccaau

SEQ ID NO: 93913 - RNA, 22 nt, Artificial Sequence
  LRRK2 RNA guide
gguaguuuguaguguaaagaac

SEQ ID NO: 93914 - RNA, 22 nt, Artificial Sequence
  LRRK2 RNA guide
guaguuuguaguguaaagaacu

SEQ ID NO: 93915 - RNA, 22 nt, Artificial Sequence
  LRRK2 RNA guide
gucuaaguucuuuacacuacaa

SEQ ID NO: 93916 - RNA, 22 nt, Artificial Sequence
  LRRK2 RNA guide
guucuuuacacuacaaacuacc

SEQ ID NO: 93917 - RNA, 22 nt, Artificial Sequence
  LRRK2 RNA guide
guuuguaguguaaagaacuuag

SEQ ID NO: 93918 - RNA, 22 nt, Artificial Sequence
  LRRK2 RNA guide
ucuuuacacuacaaacuaccaa

SEQ ID NO: 93919 - RNA, 22 nt, Artificial Sequence
  LRRK2 RNA guide
ugguaguuuguaguguaaagaa

SEQ ID NO: 93920 - RNA, 22 nt, Artificial Sequence
  LRRK2 RNA guide
uguaguguaaagaacuuagaca

SEQ ID NO: 93921 - RNA, 22 nt, Artificial Sequence
  LRRK2 RNA guide
ugucuaaguucuuuacacuaca

SEQ ID NO: 93922 - RNA, 22 nt, Artificial Sequence
  LRRK2 RNA guide
uucuuuacacuacaaacuacca

SEQ ID NO: 93923 - RNA, 22 nt, Artificial Sequence
  LRRK2 RNA guide
uugguaguuuguaguguaaaga

SEQ ID NO: 93924 - RNA, 22 nt, Artificial Sequence
  LRRK2 RNA guide
uuguaguguaaagaacuuagac

SEQ ID NO: 93925 - RNA, 20 nt, Artificial Sequence
  LRRK2 RNA guide
aaacacagcuauaacuaaug

SEQ ID NO: 93926 - RNA, 20 nt, Artificial Sequence
  LRRK2 RNA guide
aacacagcuauaacuaaugu

SEQ ID NO: 93927 - RNA, 20 nt, Artificial Sequence
  LRRK2 RNA guide
acacagcuauaacuaaugua

SEQ ID NO: 93928 - RNA, 20 nt, Artificial Sequence
  LRRK2 RNA guide
acagcuauaacuaauguacu

SEQ ID NO: 93929 - RNA, 20 nt, Artificial Sequence
  LRRK2 RNA guide
aguacauuaguuauagcugu

SEQ ID NO: 93930 - RNA, 20 nt, Artificial Sequence
  LRRK2 RNA guide
cacagcuauaacuaauguac

SEQ ID NO: 93931 - RNA, 20 nt, Artificial Sequence
  LRRK2 RNA guide
cagcuauaacuaauguacua

SEQ ID NO: 93932 - RNA, 20 nt, Artificial Sequence
  LRRK2 RNA guide
guacauuaguuauagcugug

SEQ ID NO: 93933 - RNA, 20 nt, Artificial Sequence
  LRRK2 RNA guide
uacauuaguuauagcugugu

SEQ ID NO: 93934 - RNA, 20 nt, Artificial Sequence
  LRRK2 RNA guide
uaguacauuaguuauagcug

SEQ ID NO: 93935 - RNA, 21 nt, Artificial Sequence
  LRRK2 RNA guide
acacagcuauaacuaauguac

SEQ ID NO: 93936 - RNA, 21 nt, Artificial Sequence
  LRRK2 RNA guide
aguacauuaguuauagcugug

SEQ ID NO: 93937 - RNA, 21 nt, Artificial Sequence
  LRRK2 RNA guide
cacagcuauaacuaauguacu

SEQ ID NO: 93938 - RNA, 21 nt, Artificial Sequence
  LRRK2 RNA guide
guacauuaguuauagcugugu

SEQ ID NO: 93939 - RNA, 22 nt, Artificial Sequence
  LRRK2 RNA guide
aacacagcuauaacuaauguac

SEQ ID NO: 93940 - RNA, 22 nt, Artificial Sequence
  LRRK2 RNA guide
acacagcuauaacuaauguacu

SEQ ID NO: 93941 - RNA, 22 nt, Artificial Sequence
  LRRK2 RNA guide
aguacauuaguuauagcugugu

SEQ ID NO: 93942 - RNA, 22 nt, Artificial Sequence
  LRRK2 RNA guide
cacagcuauaacuaauguacua

SEQ ID NO: 93943 - RNA, 22 nt, Artificial Sequence
  LRRK2 RNA guide
guacauuaguuauagcuguguu

SEQ ID NO: 93944 - RNA, 22 nt, Artificial Sequence
  LRRK2 RNA guide
uaguacauuaguuauagcugug

SEQ ID NO: 93945 - RNA, 20 nt, Artificial Sequence
  LRRK2 RNA guide
aacacagcuauaacuaauga

SEQ ID NO: 93946 - RNA, 20 nt, Artificial Sequence
  LRRK2 RNA guide
acacagcuauaacuaaugaa

SEQ ID NO: 93947 - RNA, 20 nt, Artificial Sequence
  LRRK2 RNA guide
acagcuauaacuaaugaacu

SEQ ID NO: 93948 - RNA, 20 nt, Artificial Sequence
  LRRK2 RNA guide
aguucauuaguuauagcugu

SEQ ID NO: 93949 - RNA, 20 nt, Artificial Sequence
  LRRK2 RNA guide
cacagcuauaacuaaugaac

SEQ ID NO: 93950 - RNA, 20 nt, Artificial Sequence
  LRRK2 RNA guide
cagcuauaacuaaugaacua

SEQ ID NO: 93951 - RNA, 20 nt, Artificial Sequence
  LRRK2 RNA guide
guucauuaguuauagcugug

SEQ ID NO: 93952 - RNA, 20 nt, Artificial Sequence
  LRRK2 RNA guide
uaguucauuaguuauagcug

SEQ ID NO: 93953 - RNA, 20 nt, Artificial Sequence
  LRRK2 RNA guide
uucauuaguuauagcugugu

SEQ ID NO: 93954 - RNA, 21 nt, Artificial Sequence
  LRRK2 RNA guide
acacagcuauaacuaaugaac

SEQ ID NO: 93955 - RNA, 21 nt, Artificial Sequence
  LRRK2 RNA guide
aguucauuaguuauagcugug

SEQ ID NO: 93956 - RNA, 21 nt, Artificial Sequence
  LRRK2 RNA guide
cacagcuauaacuaaugaacu

SEQ ID NO: 93957 - RNA, 21 nt, Artificial Sequence
  LRRK2 RNA guide
guucauuaguuauagcugugu

SEQ ID NO: 93958 - RNA, 22 nt, Artificial Sequence
  LRRK2 RNA guide
aacacagcuauaacuaaugaac

SEQ ID NO: 93959 - RNA, 22 nt, Artificial Sequence
  LRRK2 RNA guide
acacagcuauaacuaaugaacu

SEQ ID NO: 93960 - RNA, 22 nt, Artificial Sequence
  LRRK2 RNA guide
aguucauuaguuauagcugugu

SEQ ID NO: 93961 - RNA, 22 nt, Artificial Sequence
  LRRK2 RNA guide
cacagcuauaacuaaugaacua

SEQ ID NO: 93962 - RNA, 22 nt, Artificial Sequence
  LRRK2 RNA guide
guucauuaguuauagcuguguu

SEQ ID NO: 93963 - RNA, 22 nt, Artificial Sequence
  LRRK2 RNA guide
uaguucauuaguuauagcugug

SEQ ID NO: 93964 - RNA, 20 nt, Artificial Sequence
  LRRK2 RNA guide
aacuaaaaauacaugagcca

SEQ ID NO: 93965 - RNA, 20 nt, Artificial Sequence
  LRRK2 RNA guide
aguuuggcucauguauuuuu

SEQ ID NO: 93966 - RNA, 20 nt, Artificial Sequence
  LRRK2 RNA guide
caacuaaaaauacaugagcc

SEQ ID NO: 93967 - RNA, 20 nt, Artificial Sequence
  LRRK2 RNA guide
caguuuggcucauguauuuu

SEQ ID NO: 93968 - RNA, 20 nt, Artificial Sequence
  LRRK2 RNA guide
cucauguauuuuuaguugac

SEQ ID NO: 93969 - RNA, 20 nt, Artificial Sequence
  LRRK2 RNA guide
gcucauguauuuuuaguuga

SEQ ID NO: 93970 - RNA, 20 nt, Artificial Sequence
  LRRK2 RNA guide
ggcucauguauuuuuaguug

SEQ ID NO: 93971 - RNA, 20 nt, Artificial Sequence
  LRRK2 RNA guide
gucaacuaaaaauacaugag

SEQ ID NO: 93972 - RNA, 20 nt, Artificial Sequence
  LRRK2 RNA guide
guuuggcucauguauuuuua

SEQ ID NO: 93973 - RNA, 20 nt, Artificial Sequence
  LRRK2 RNA guide
ucaacuaaaaauacaugagc

SEQ ID NO: 93974 - RNA, 20 nt, Artificial Sequence
  LRRK2 RNA guide
ucaguuuggcucauguauuu

SEQ ID NO: 93975 - RNA, 20 nt, Artificial Sequence
  LRRK2 RNA guide
uggcucauguauuuuuaguu

SEQ ID NO: 93976 - RNA, 20 nt, Artificial Sequence
  LRRK2 RNA guide
uuggcucauguauuuuuagu

SEQ ID NO: 93977 - RNA, 20 nt, Artificial Sequence
  LRRK2 RNA guide
uuuggcucauguauuuuuag

SEQ ID NO: 93978 - RNA, 21 nt, Artificial Sequence
  LRRK2 RNA guide
caacuaaaaauacaugagcca

SEQ ID NO: 93979 - RNA, 21 nt, Artificial Sequence
  LRRK2 RNA guide
caguuuggcucauguauuuuu

SEQ ID NO: 93980 - RNA, 21 nt, Artificial Sequence
  LRRK2 RNA guide
gcucauguauuuuuaguugac

SEQ ID NO: 93981 - RNA, 21 nt, Artificial Sequence
  LRRK2 RNA guide
ggcucauguauuuuuaguuga

SEQ ID NO: 93982 - RNA, 21 nt, Artificial Sequence
  LRRK2 RNA guide
gucaacuaaaaauacaugagc

SEQ ID NO: 93983 - RNA, 21 nt, Artificial Sequence
  LRRK2 RNA guide
guuuggcucauguauuuuuag

SEQ ID NO: 93984 - RNA, 21 nt, Artificial Sequence
  LRRK2 RNA guide
ucaacuaaaaauacaugagcc

SEQ ID NO: 93985 - RNA, 21 nt, Artificial Sequence
  LRRK2 RNA guide
ucaguuuggcucauguauuuu

SEQ ID NO: 93986 - RNA, 21 nt, Artificial Sequence
  LRRK2 RNA guide
uggcucauguauuuuuaguug

SEQ ID NO: 93987 - RNA, 21 nt, Artificial Sequence
  LRRK2 RNA guide
uucaguuuggcucauguauuu

SEQ ID NO: 93988 - RNA, 22 nt, Artificial Sequence
  LRRK2 RNA guide
agucaacuaaaaauacaugagc

SEQ ID NO: 93989 - RNA, 22 nt, Artificial Sequence
  LRRK2 RNA guide
aguuuggcucauguauuuuuag

SEQ ID NO: 93990 - RNA, 22 nt, Artificial Sequence
  LRRK2 RNA guide
caacuaaaaauacaugagccaa

SEQ ID NO: 93991 - RNA, 22 nt, Artificial Sequence
  LRRK2 RNA guide
caguuuggcucauguauuuuua

SEQ ID NO: 93992 - RNA, 22 nt, Artificial Sequence
  LRRK2 RNA guide
gcucauguauuuuuaguugacu

SEQ ID NO: 93993 - RNA, 22 nt, Artificial Sequence
  LRRK2 RNA guide
ggcucauguauuuuuaguugac

SEQ ID NO: 93994 - RNA, 22 nt, Artificial Sequence
  LRRK2 RNA guide
gucaacuaaaaauacaugagcc

SEQ ID NO: 93995 - RNA, 22 nt, Artificial Sequence
  LRRK2 RNA guide
guuuggcucauguauuuuuagu

SEQ ID NO: 93996 - RNA, 22 nt, Artificial Sequence
  LRRK2 RNA guide
ucaacuaaaaauacaugagcca

SEQ ID NO: 93997 - RNA, 22 nt, Artificial Sequence
  LRRK2 RNA guide
ucaguuuggcucauguauuuuu

SEQ ID NO: 93998 - RNA, 22 nt, Artificial Sequence
  LRRK2 RNA guide
uggcucauguauuuuuaguuga

SEQ ID NO: 93999 - RNA, 22 nt, Artificial Sequence
  LRRK2 RNA guide
uucaguuuggcucauguauuuu

SEQ ID NO: 94000 - RNA, 22 nt, Artificial Sequence
  LRRK2 RNA guide
uuggcucauguauuuuuaguug

SEQ ID NO: 94001 - RNA, 22 nt, Artificial Sequence
  LRRK2 RNA guide
uuucaguuuggcucauguauuu

SEQ ID NO: 94002 - RNA, 20 nt, Artificial Sequence
  LRRK2 RNA guide
aagucagcuaaaaauacaug

SEQ ID NO: 94003 - RNA, 20 nt, Artificial Sequence
  LRRK2 RNA guide
acauuuaucuaagucagcua

SEQ ID NO: 94004 - RNA, 20 nt, Artificial Sequence
  LRRK2 RNA guide
agcuaaaaauacaugagcca

SEQ ID NO: 94005 - RNA, 20 nt, Artificial Sequence
  LRRK2 RNA guide
agcugacuuagauaaaugua

SEQ ID NO: 94006 - RNA, 20 nt, Artificial Sequence
  LRRK2 RNA guide
agucagcuaaaaauacauga

SEQ ID NO: 94007 - RNA, 20 nt, Artificial Sequence
  LRRK2 RNA guide
cagcuaaaaauacaugagcc

SEQ ID NO: 94008 - RNA, 20 nt, Artificial Sequence
  LRRK2 RNA guide
cauguauuuuuagcugacuu

SEQ ID NO: 94009 - RNA, 20 nt, Artificial Sequence
  LRRK2 RNA guide
cauuuaucuaagucagcuaa

SEQ ID NO: 94010 - RNA, 20 nt, Artificial Sequence
  LRRK2 RNA guide
cuaagucagcuaaaaauaca

SEQ ID NO: 94011 - RNA, 20 nt, Artificial Sequence
  LRRK2 RNA guide
cucauguauuuuuagcugac

SEQ ID NO: 94012 - RNA, 20 nt, Artificial Sequence
  LRRK2 RNA guide
gcucauguauuuuuagcuga

SEQ ID NO: 94013 - RNA, 20 nt, Artificial Sequence
  LRRK2 RNA guide
gcugacuuagauaaauguaa

SEQ ID NO: 94014 - RNA, 20 nt, Artificial Sequence
  LRRK2 RNA guide
ggcucauguauuuuuagcug

SEQ ID NO: 94015 - RNA, 20 nt, Artificial Sequence
  LRRK2 RNA guide
guauuuuuagcugacuuaga

SEQ ID NO: 94016 - RNA, 20 nt, Artificial Sequence
  LRRK2 RNA guide
gucagcuaaaaauacaugag

SEQ ID NO: 94017 - RNA, 20 nt, Artificial Sequence
  LRRK2 RNA guide
uacauuuaucuaagucagcu

SEQ ID NO: 94018 - RNA, 20 nt, Artificial Sequence
  LRRK2 RNA guide
uagcugacuuagauaaaugu

SEQ ID NO: 94019 - RNA, 20 nt, Artificial Sequence
  LRRK2 RNA guide
ucagcuaaaaauacaugagc

SEQ ID NO: 94020 - RNA, 20 nt, Artificial Sequence
  LRRK2 RNA guide
ucauguauuuuuagcugacu

SEQ ID NO: 94021 - RNA, 20 nt, Artificial Sequence
  LRRK2 RNA guide
ucuaagucagcuaaaaauac

SEQ ID NO: 94022 - RNA, 20 nt, Artificial Sequence
  LRRK2 RNA guide
uggcucauguauuuuuagcu

SEQ ID NO: 94023 - RNA, 20 nt, Artificial Sequence
  LRRK2 RNA guide
uguauuuuuagcugacuuag

SEQ ID NO: 94024 - RNA, 20 nt, Artificial Sequence
  LRRK2 RNA guide
uuacauuuaucuaagucagc

SEQ ID NO: 94025 - RNA, 20 nt, Artificial Sequence
  LRRK2 RNA guide
uuagcugacuuagauaaaug

SEQ ID NO: 94026 - RNA, 20 nt, Artificial Sequence
  LRRK2 RNA guide
uuggcucauguauuuuuagc

SEQ ID NO: 94027 - RNA, 21 nt, Artificial Sequence
  LRRK2 RNA guide
agcuaaaaauacaugagccaa

SEQ ID NO: 94028 - RNA, 21 nt, Artificial Sequence
  LRRK2 RNA guide
agucagcuaaaaauacaugag

SEQ ID NO: 94029 - RNA, 21 nt, Artificial Sequence
  LRRK2 RNA guide
cagcuaaaaauacaugagcca

SEQ ID NO: 94030 - RNA, 21 nt, Artificial Sequence
  LRRK2 RNA guide
cucauguauuuuuagcugacu

SEQ ID NO: 94031 - RNA, 21 nt, Artificial Sequence
  LRRK2 RNA guide
gcucauguauuuuuagcugac

SEQ ID NO: 94032 - RNA, 21 nt, Artificial Sequence
  LRRK2 RNA guide
ggcucauguauuuuuagcuga

SEQ ID NO: 94033 - RNA, 21 nt, Artificial Sequence
  LRRK2 RNA guide
gucagcuaaaaauacaugagc

SEQ ID NO: 94034 - RNA, 21 nt, Artificial Sequence
  LRRK2 RNA guide
ucagcuaaaaauacaugagcc

SEQ ID NO: 94035 - RNA, 21 nt, Artificial Sequence
  LRRK2 RNA guide
uggcucauguauuuuuagcug

SEQ ID NO: 94036 - RNA, 21 nt, Artificial Sequence
  LRRK2 RNA guide
uuggcucauguauuuuuagcu

SEQ ID NO: 94037 - RNA, 21 nt, Artificial Sequence
  LRRK2 RNA guide
uuuggcucauguauuuuuagc

SEQ ID NO: 94038 - RNA, 22 nt, Artificial Sequence
  LRRK2 RNA guide
aagucagcuaaaaauacaugag

SEQ ID NO: 94039 - RNA, 22 nt, Artificial Sequence
  LRRK2 RNA guide
agcuaaaaauacaugagccaaa

SEQ ID NO: 94040 - RNA, 22 nt, Artificial Sequence
  LRRK2 RNA guide
agucagcuaaaaauacaugagc

SEQ ID NO: 94041 - RNA, 22 nt, Artificial Sequence
  LRRK2 RNA guide
cagcuaaaaauacaugagccaa

SEQ ID NO: 94042 - RNA, 22 nt, Artificial Sequence
  LRRK2 RNA guide
cauguauuuuuagcugacuuag

SEQ ID NO: 94043 - RNA, 22 nt, Artificial Sequence
  LRRK2 RNA guide
cuaagucagcuaaaaauacaug

SEQ ID NO: 94044 - RNA, 22 nt, Artificial Sequence
  LRRK2 RNA guide
cucauguauuuuuagcugacuu

SEQ ID NO: 94045 - RNA, 22 nt, Artificial Sequence
  LRRK2 RNA guide
gcucauguauuuuuagcugacu

SEQ ID NO: 94046 - RNA, 22 nt, Artificial Sequence
  LRRK2 RNA guide
ggcucauguauuuuuagcugac

SEQ ID NO: 94047 - RNA, 22 nt, Artificial Sequence
  LRRK2 RNA guide
gucagcuaaaaauacaugagcc

SEQ ID NO: 94048 - RNA, 22 nt, Artificial Sequence
  LRRK2 RNA guide
guuuggcucauguauuuuuagc

SEQ ID NO: 94049 - RNA, 22 nt, Artificial Sequence
  LRRK2 RNA guide
ucagcuaaaaauacaugagcca

SEQ ID NO: 94050 - RNA, 22 nt, Artificial Sequence
  LRRK2 RNA guide
uggcucauguauuuuuagcuga

SEQ ID NO: 94051 - RNA, 22 nt, Artificial Sequence
  LRRK2 RNA guide
uuggcucauguauuuuuagcug

SEQ ID NO: 94052 - RNA, 22 nt, Artificial Sequence
  LRRK2 RNA guide
uuuggcucauguauuuuuagcu

SEQ ID NO: 94053 - RNA, 20 nt, Artificial Sequence
  LRRK2 RNA guide
aaaaaugugaguacccuuuc

SEQ ID NO: 94054 - RNA, 20 nt, Artificial Sequence
  LRRK2 RNA guide
aaaaugugaguacccuuucc

SEQ ID NO: 94055 - RNA, 20 nt, Artificial Sequence
  LRRK2 RNA guide
aaaggguacucacauuuuuu

SEQ ID NO: 94056 - RNA, 20 nt, Artificial Sequence
  LRRK2 RNA guide
aaggguacucacauuuuuug

SEQ ID NO: 94057 - RNA, 20 nt, Artificial Sequence
  LRRK2 RNA guide
acacacgagcuauuucaaaa

SEQ ID NO: 94058 - RNA, 20 nt, Artificial Sequence
  LRRK2 RNA guide
acacgagcuauuucaaaaaa

SEQ ID NO: 94059 - RNA, 20 nt, Artificial Sequence
  LRRK2 RNA guide
acauggaaaggguacucaca

SEQ ID NO: 94060 - RNA, 20 nt, Artificial Sequence
  LRRK2 RNA guide
acauuuuuugaaauagcucg

SEQ ID NO: 94061 - RNA, 20 nt, Artificial Sequence
  LRRK2 RNA guide
acgagcuauuucaaaaaaug

SEQ ID NO: 94062 - RNA, 20 nt, Artificial Sequence
  LRRK2 RNA guide
aggguacucacauuuuuuga

SEQ ID NO: 94063 - RNA, 20 nt, Artificial Sequence
  LRRK2 RNA guide
auggaaaggguacucacauu

SEQ ID NO: 94064 - RNA, 20 nt, Artificial Sequence
  LRRK2 RNA guide
auuuuuugaaauagcucgug

SEQ ID NO: 94065 - RNA, 20 nt, Artificial Sequence
  LRRK2 RNA guide
caaaaaaugugaguacccuu

SEQ ID NO: 94066 - RNA, 20 nt, Artificial Sequence
  LRRK2 RNA guide
cacacgagcuauuucaaaaa

SEQ ID NO: 94067 - RNA, 20 nt, Artificial Sequence
  LRRK2 RNA guide
cacauggaaaggguacucac

SEQ ID NO: 94068 - RNA, 20 nt, Artificial Sequence
  LRRK2 RNA guide
cacauuuuuugaaauagcuc

SEQ ID NO: 94069 - RNA, 20 nt, Artificial Sequence
  LRRK2 RNA guide
cacgagcuauuucaaaaaau

SEQ ID NO: 94070 - RNA, 20 nt, Artificial Sequence
  LRRK2 RNA guide
cauacacacgagcuauuuca

SEQ ID NO: 94071 - RNA, 20 nt, Artificial Sequence
  LRRK2 RNA guide
cauggaaaggguacucacau

SEQ ID NO: 94072 - RNA, 20 nt, Artificial Sequence
  LRRK2 RNA guide
cauuuuuugaaauagcucgu

SEQ ID NO: 94073 - RNA, 20 nt, Artificial Sequence
  LRRK2 RNA guide
cgagcuauuucaaaaaaugu

SEQ ID NO: 94074 - RNA, 20 nt, Artificial Sequence
  LRRK2 RNA guide
cucacauuuuuugaaauagc

SEQ ID NO: 94075 - RNA, 20 nt, Artificial Sequence
  LRRK2 RNA guide
gaaaggguacucacauuuuu

SEQ ID NO: 94076 - RNA, 20 nt, Artificial Sequence
  LRRK2 RNA guide
gagcuauuucaaaaaaugug

SEQ ID NO: 94077 - RNA, 20 nt, Artificial Sequence
  LRRK2 RNA guide
ggaaaggguacucacauuuu

SEQ ID NO: 94078 - RNA, 20 nt, Artificial Sequence
  LRRK2 RNA guide
ggguacucacauuuuuugaa

SEQ ID NO: 94079 - RNA, 20 nt, Artificial Sequence
  LRRK2 RNA guide
gguacucacauuuuuugaaa

SEQ ID NO: 94080 - RNA, 20 nt, Artificial Sequence
  LRRK2 RNA guide
uacacacgagcuauuucaaa

SEQ ID NO: 94081 - RNA, 20 nt, Artificial Sequence
  LRRK2 RNA guide
ucaaaaaaugugaguacccu

SEQ ID NO: 94082 - RNA, 20 nt, Artificial Sequence
  LRRK2 RNA guide
ucacauggaaaggguacuca

SEQ ID NO: 94083 - RNA, 20 nt, Artificial Sequence
  LRRK2 RNA guide
ucauacacacgagcuauuuc

SEQ ID NO: 94084 - RNA, 20 nt, Artificial Sequence
  LRRK2 RNA guide
uggaaaggguacucacauuu

SEQ ID NO: 94085 - RNA, 20 nt, Artificial Sequence
  LRRK2 RNA guide
uucaaaaaaugugaguaccc

SEQ ID NO: 94086 - RNA, 20 nt, Artificial Sequence
  LRRK2 RNA guide
uucauacacacgagcuauuu

SEQ ID NO: 94087 - RNA, 20 nt, Artificial Sequence
  LRRK2 RNA guide
uuucaaaaaaugugaguacc

SEQ ID NO: 94088 - RNA, 20 nt, Artificial Sequence
  LRRK2 RNA guide
uuuuugaaauagcucgugug

SEQ ID NO: 94089 - RNA, 20 nt, Artificial Sequence
  LRRK2 RNA guide
uuuuuugaaauagcucgugu

SEQ ID NO: 94090 - RNA, 21 nt, Artificial Sequence
  LRRK2 RNA guide
aaaaaaugugaguacccuuuc

SEQ ID NO: 94091 - RNA, 21 nt, Artificial Sequence
  LRRK2 RNA guide
aaaaaugugaguacccuuucc

SEQ ID NO: 94092 - RNA, 21 nt, Artificial Sequence
  LRRK2 RNA guide
aaaaugugaguacccuuucca

SEQ ID NO: 94093 - RNA, 21 nt, Artificial Sequence
  LRRK2 RNA guide
aaaggguacucacauuuuuug

SEQ ID NO: 94094 - RNA, 21 nt, Artificial Sequence
  LRRK2 RNA guide
aaggguacucacauuuuuuga

SEQ ID NO: 94095 - RNA, 21 nt, Artificial Sequence
  LRRK2 RNA guide
acacacgagcuauuucaaaaa

SEQ ID NO: 94096 - RNA, 21 nt, Artificial Sequence
  LRRK2 RNA guide
acauggaaaggguacucacau

SEQ ID NO: 94097 - RNA, 21 nt, Artificial Sequence
  LRRK2 RNA guide
aggguacucacauuuuuugaa

SEQ ID NO: 94098 - RNA, 21 nt, Artificial Sequence
  LRRK2 RNA guide
auacacacgagcuauuucaaa

SEQ ID NO: 94099 - RNA, 21 nt, Artificial Sequence
  LRRK2 RNA guide
auggaaaggguacucacauuu

SEQ ID NO: 94100 - RNA, 21 nt, Artificial Sequence
  LRRK2 RNA guide
caaaaaaugugaguacccuuu

SEQ ID NO: 94101 - RNA, 21 nt, Artificial Sequence
  LRRK2 RNA guide
cacacgagcuauuucaaaaaa

SEQ ID NO: 94102 - RNA, 21 nt, Artificial Sequence
  LRRK2 RNA guide
cacauggaaaggguacucaca

SEQ ID NO: 94103 - RNA, 21 nt, Artificial Sequence
  LRRK2 RNA guide
cacauuuuuugaaauagcucg

SEQ ID NO: 94104 - RNA, 21 nt, Artificial Sequence
  LRRK2 RNA guide
cacgagcuauuucaaaaaaug

SEQ ID NO: 94105 - RNA, 21 nt, Artificial Sequence
  LRRK2 RNA guide
cauacacacgagcuauuucaa

SEQ ID NO: 94106 - RNA, 21 nt, Artificial Sequence
  LRRK2 RNA guide
cauggaaaggguacucacauu

SEQ ID NO: 94107 - RNA, 21 nt, Artificial Sequence
  LRRK2 RNA guide
cauuuuuugaaauagcucgug

SEQ ID NO: 94108 - RNA, 21 nt, Artificial Sequence
  LRRK2 RNA guide
cgagcuauuucaaaaaaugug

SEQ ID NO: 94109 - RNA, 21 nt, Artificial Sequence
  LRRK2 RNA guide
cuucauacacacgagcuauuu

SEQ ID NO: 94110 - RNA, 21 nt, Artificial Sequence
  LRRK2 RNA guide
gaaaggguacucacauuuuuu

SEQ ID NO: 94111 - RNA, 21 nt, Artificial Sequence
  LRRK2 RNA guide
ggaaaggguacucacauuuuu

SEQ ID NO: 94112 - RNA, 21 nt, Artificial Sequence
  LRRK2 RNA guide
ggguacucacauuuuuugaaa

SEQ ID NO: 94113 - RNA, 21 nt, Artificial Sequence
  LRRK2 RNA guide
uacacacgagcuauuucaaaa

SEQ ID NO: 94114 - RNA, 21 nt, Artificial Sequence
  LRRK2 RNA guide
ucaaaaaaugugaguacccuu

SEQ ID NO: 94115 - RNA, 21 nt, Artificial Sequence
  LRRK2 RNA guide
ucacauggaaaggguacucac

SEQ ID NO: 94116 - RNA, 21 nt, Artificial Sequence
  LRRK2 RNA guide
ucauacacacgagcuauuuca

SEQ ID NO: 94117 - RNA, 21 nt, Artificial Sequence
  LRRK2 RNA guide
uggaaaggguacucacauuuu

SEQ ID NO: 94118 - RNA, 21 nt, Artificial Sequence
  LRRK2 RNA guide
uucaaaaaaugugaguacccu

SEQ ID NO: 94119 - RNA, 21 nt, Artificial Sequence
  LRRK2 RNA guide
uucacauggaaaggguacuca

SEQ ID NO: 94120 - RNA, 21 nt, Artificial Sequence
  LRRK2 RNA guide
uuucaaaaaaugugaguaccc

SEQ ID NO: 94121 - RNA, 21 nt, Artificial Sequence
  LRRK2 RNA guide
uuuuugaaauagcucgugugu

SEQ ID NO: 94122 - RNA, 21 nt, Artificial Sequence
  LRRK2 RNA guide
uuuuuugaaauagcucgugug

SEQ ID NO: 94123 - RNA, 22 nt, Artificial Sequence
  LRRK2 RNA guide
aaaaaaugugaguacccuuucc

SEQ ID NO: 94124 - RNA, 22 nt, Artificial Sequence
  LRRK2 RNA guide
aaaaaugugaguacccuuucca

SEQ ID NO: 94125 - RNA, 22 nt, Artificial Sequence
  LRRK2 RNA guide
aaaaugugaguacccuuuccau

SEQ ID NO: 94126 - RNA, 22 nt, Artificial Sequence
  LRRK2 RNA guide
aaaggguacucacauuuuuuga

SEQ ID NO: 94127 - RNA, 22 nt, Artificial Sequence
  LRRK2 RNA guide
aaggguacucacauuuuuugaa

SEQ ID NO: 94128 - RNA, 22 nt, Artificial Sequence
  LRRK2 RNA guide
acacacgagcuauuucaaaaaa

SEQ ID NO: 94129 - RNA, 22 nt, Artificial Sequence
  LRRK2 RNA guide
acacgagcuauuucaaaaaaug

SEQ ID NO: 94130 - RNA, 22 nt, Artificial Sequence
  LRRK2 RNA guide
acauggaaaggguacucacauu

SEQ ID NO: 94131 - RNA, 22 nt, Artificial Sequence
  LRRK2 RNA guide
acauuuuuugaaauagcucgug

SEQ ID NO: 94132 - RNA, 22 nt, Artificial Sequence
  LRRK2 RNA guide
acgagcuauuucaaaaaaugug

SEQ ID NO: 94133 - RNA, 22 nt, Artificial Sequence
  LRRK2 RNA guide
aggguacucacauuuuuugaaa

SEQ ID NO: 94134 - RNA, 22 nt, Artificial Sequence
  LRRK2 RNA guide
auacacacgagcuauuucaaaa

SEQ ID NO: 94135 - RNA, 22 nt, Artificial Sequence
  LRRK2 RNA guide
auggaaaggguacucacauuuu

SEQ ID NO: 94136 - RNA, 22 nt, Artificial Sequence
  LRRK2 RNA guide
auuucaaaaaaugugaguaccc

SEQ ID NO: 94137 - RNA, 22 nt, Artificial Sequence
  LRRK2 RNA guide
auuuuuugaaauagcucgugug

SEQ ID NO: 94138 - RNA, 22 nt, Artificial Sequence
  LRRK2 RNA guide
caaaaaaugugaguacccuuuc

SEQ ID NO: 94139 - RNA, 22 nt, Artificial Sequence
  LRRK2 RNA guide
cacacgagcuauuucaaaaaau

SEQ ID NO: 94140 - RNA, 22 nt, Artificial Sequence
  LRRK2 RNA guide
cacauggaaaggguacucacau

SEQ ID NO: 94141 - RNA, 22 nt, Artificial Sequence
  LRRK2 RNA guide
cacauuuuuugaaauagcucgu

SEQ ID NO: 94142 - RNA, 22 nt, Artificial Sequence
  LRRK2 RNA guide
cacgagcuauuucaaaaaaugu

SEQ ID NO: 94143 - RNA, 22 nt, Artificial Sequence
  LRRK2 RNA guide
cauacacacgagcuauuucaaa

SEQ ID NO: 94144 - RNA, 22 nt, Artificial Sequence
  LRRK2 RNA guide
cauggaaaggguacucacauuu

SEQ ID NO: 94145 - RNA, 22 nt, Artificial Sequence
  LRRK2 RNA guide
cauuuuuugaaauagcucgugu

SEQ ID NO: 94146 - RNA, 22 nt, Artificial Sequence
  LRRK2 RNA guide
ccuucauacacacgagcuauuu

SEQ ID NO: 94147 - RNA, 22 nt, Artificial Sequence
  LRRK2 RNA guide
cucacauuuuuugaaauagcuc

SEQ ID NO: 94148 - RNA, 22 nt, Artificial Sequence
  LRRK2 RNA guide
cuucauacacacgagcuauuuc

SEQ ID NO: 94149 - RNA, 22 nt, Artificial Sequence
  LRRK2 RNA guide
gaaaggguacucacauuuuuug

SEQ ID NO: 94150 - RNA, 22 nt, Artificial Sequence
  LRRK2 RNA guide
ggaaaggguacucacauuuuuu

SEQ ID NO: 94151 - RNA, 22 nt, Artificial Sequence
  LRRK2 RNA guide
ggguacucacauuuuuugaaau

SEQ ID NO: 94152 - RNA, 22 nt, Artificial Sequence
  LRRK2 RNA guide
guucacauggaaaggguacuca

SEQ ID NO: 94153 - RNA, 22 nt, Artificial Sequence
  LRRK2 RNA guide
uacacacgagcuauuucaaaaa

SEQ ID NO: 94154 - RNA, 22 nt, Artificial Sequence
  LRRK2 RNA guide
ucaaaaaaugugaguacccuuu

SEQ ID NO: 94155 - RNA, 22 nt, Artificial Sequence
  LRRK2 RNA guide
ucacauggaaaggguacucaca

SEQ ID NO: 94156 - RNA, 22 nt, Artificial Sequence
  LRRK2 RNA guide
ucacauuuuuugaaauagcucg

SEQ ID NO: 94157 - RNA, 22 nt, Artificial Sequence
  LRRK2 RNA guide
ucauacacacgagcuauuucaa

SEQ ID NO: 94158 - RNA, 22 nt, Artificial Sequence
  LRRK2 RNA guide
uggaaaggguacucacauuuuu

SEQ ID NO: 94159 - RNA, 22 nt, Artificial Sequence
  LRRK2 RNA guide
uucaaaaaaugugaguacccuu

SEQ ID NO: 94160 - RNA, 22 nt, Artificial Sequence
  LRRK2 RNA guide
uucacauggaaaggguacucac

SEQ ID NO: 94161 - RNA, 22 nt, Artificial Sequence
  LRRK2 RNA guide
uucauacacacgagcuauuuca

SEQ ID NO: 94162 - RNA, 22 nt, Artificial Sequence
  LRRK2 RNA guide
uuucaaaaaaugugaguacccu

SEQ ID NO: 94163 - RNA, 22 nt, Artificial Sequence
  LRRK2 RNA guide
uuuuugaaauagcucgugugua

SEQ ID NO: 94164 - RNA, 22 nt, Artificial Sequence
  LRRK2 RNA guide
uuuuuugaaauagcucgugugu

SEQ ID NO: 94165 - RNA, 20 nt, Artificial Sequence
  LRRK2 RNA guide
aaagaaugugaguacccuuu

SEQ ID NO: 94166 - RNA, 20 nt, Artificial Sequence
  LRRK2 RNA guide
aaaggguacucacauucuuu

SEQ ID NO: 94167 - RNA, 20 nt, Artificial Sequence
  LRRK2 RNA guide
aagaaugugaguacccuuuc

SEQ ID NO: 94168 - RNA, 20 nt, Artificial Sequence
  LRRK2 RNA guide
aaggguacucacauucuuug

SEQ ID NO: 94169 - RNA, 20 nt, Artificial Sequence
  LRRK2 RNA guide
acacacgagcuauuucaaag

SEQ ID NO: 94170 - RNA, 20 nt, Artificial Sequence
  LRRK2 RNA guide
acacgagcuauuucaaagaa

SEQ ID NO: 94171 - RNA, 20 nt, Artificial Sequence
  LRRK2 RNA guide
acauucuuugaaauagcucg

SEQ ID NO: 94172 - RNA, 20 nt, Artificial Sequence
  LRRK2 RNA guide
acgagcuauuucaaagaaug

SEQ ID NO: 94173 - RNA, 20 nt, Artificial Sequence
  LRRK2 RNA guide
acucacauucuuugaaauag

SEQ ID NO: 94174 - RNA, 20 nt, Artificial Sequence
  LRRK2 RNA guide
agaaugugaguacccuuucc

SEQ ID NO: 94175 - RNA, 20 nt, Artificial Sequence
  LRRK2 RNA guide
agcuauuucaaagaauguga

SEQ ID NO: 94176 - RNA, 20 nt, Artificial Sequence
  LRRK2 RNA guide
aggguacucacauucuuuga

SEQ ID NO: 94177 - RNA, 20 nt, Artificial Sequence
  LRRK2 RNA guide
auucuuugaaauagcucgug

SEQ ID NO: 94178 - RNA, 20 nt, Artificial Sequence
  LRRK2 RNA guide
auuucaaagaaugugaguac

SEQ ID NO: 94179 - RNA, 20 nt, Artificial Sequence
  LRRK2 RNA guide
caaagaaugugaguacccuu

SEQ ID NO: 94180 - RNA, 20 nt, Artificial Sequence
  LRRK2 RNA guide
cacacgagcuauuucaaaga

SEQ ID NO: 94181 - RNA, 20 nt, Artificial Sequence
  LRRK2 RNA guide
cacauucuuugaaauagcuc

SEQ ID NO: 94182 - RNA, 20 nt, Artificial Sequence
  LRRK2 RNA guide
cacgagcuauuucaaagaau

SEQ ID NO: 94183 - RNA, 20 nt, Artificial Sequence
  LRRK2 RNA guide
cauucuuugaaauagcucgu

SEQ ID NO: 94184 - RNA, 20 nt, Artificial Sequence
  LRRK2 RNA guide
cgagcuauuucaaagaaugu

SEQ ID NO: 94185 - RNA, 20 nt, Artificial Sequence
  LRRK2 RNA guide
cuauuucaaagaaugugagu

SEQ ID NO: 94186 - RNA, 20 nt, Artificial Sequence
  LRRK2 RNA guide
cucacauucuuugaaauagc

SEQ ID NO: 94187 - RNA, 20 nt, Artificial Sequence
  LRRK2 RNA guide
gaaaggguacucacauucuu

SEQ ID NO: 94188 - RNA, 20 nt, Artificial Sequence
  LRRK2 RNA guide
gagcuauuucaaagaaugug

SEQ ID NO: 94189 - RNA, 20 nt, Artificial Sequence
  LRRK2 RNA guide
gcuauuucaaagaaugugag

SEQ ID NO: 94190 - RNA, 20 nt, Artificial Sequence
  LRRK2 RNA guide
ggaaaggguacucacauucu

SEQ ID NO: 94191 - RNA, 20 nt, Artificial Sequence
  LRRK2 RNA guide
ggguacucacauucuuugaa

SEQ ID NO: 94192 - RNA, 20 nt, Artificial Sequence
  LRRK2 RNA guide
gguacucacauucuuugaaa

SEQ ID NO: 94193 - RNA, 20 nt, Artificial Sequence
  LRRK2 RNA guide
guacucacauucuuugaaau

SEQ ID NO: 94194 - RNA, 20 nt, Artificial Sequence
  LRRK2 RNA guide
ucaaagaaugugaguacccu

SEQ ID NO: 94195 - RNA, 20 nt, Artificial Sequence
  LRRK2 RNA guide
ucacauucuuugaaauagcu

SEQ ID NO: 94196 - RNA, 20 nt, Artificial Sequence
  LRRK2 RNA guide
ucuuugaaauagcucgugug

SEQ ID NO: 94197 - RNA, 20 nt, Artificial Sequence
  LRRK2 RNA guide
uggaaaggguacucacauuc

SEQ ID NO: 94198 - RNA, 20 nt, Artificial Sequence
  LRRK2 RNA guide
uucaaagaaugugaguaccc

SEQ ID NO: 94199 - RNA, 20 nt, Artificial Sequence
  LRRK2 RNA guide
uucuuugaaauagcucgugu

SEQ ID NO: 94200 - RNA, 20 nt, Artificial Sequence
  LRRK2 RNA guide
uuucaaagaaugugaguacc

SEQ ID NO: 94201 - RNA, 21 nt, Artificial Sequence
  LRRK2 RNA guide
aaagaaugugaguacccuuuc

SEQ ID NO: 94202 - RNA, 21 nt, Artificial Sequence
  LRRK2 RNA guide
aaaggguacucacauucuuug

SEQ ID NO: 94203 - RNA, 21 nt, Artificial Sequence
  LRRK2 RNA guide
aagaaugugaguacccuuucc

SEQ ID NO: 94204 - RNA, 21 nt, Artificial Sequence
  LRRK2 RNA guide
aaggguacucacauucuuuga

SEQ ID NO: 94205 - RNA, 21 nt, Artificial Sequence
  LRRK2 RNA guide
acacacgagcuauuucaaaga

SEQ ID NO: 94206 - RNA, 21 nt, Artificial Sequence
  LRRK2 RNA guide
acacgagcuauuucaaagaau

SEQ ID NO: 94207 - RNA, 21 nt, Artificial Sequence
  LRRK2 RNA guide
acauucuuugaaauagcucgu

SEQ ID NO: 94208 - RNA, 21 nt, Artificial Sequence
  LRRK2 RNA guide
acgagcuauuucaaagaaugu

SEQ ID NO: 94209 - RNA, 21 nt, Artificial Sequence
  LRRK2 RNA guide
acucacauucuuugaaauagc

SEQ ID NO: 94210 - RNA, 21 nt, Artificial Sequence
  LRRK2 RNA guide
agaaugugaguacccuuucca

SEQ ID NO: 94211 - RNA, 21 nt, Artificial Sequence
  LRRK2 RNA guide
agcuauuucaaagaaugugag

SEQ ID NO: 94212 - RNA, 21 nt, Artificial Sequence
  LRRK2 RNA guide
aggguacucacauucuuugaa

SEQ ID NO: 94213 - RNA, 21 nt, Artificial Sequence
  LRRK2 RNA guide
auggaaaggguacucacauuc

SEQ ID NO: 94214 - RNA, 21 nt, Artificial Sequence
  LRRK2 RNA guide
auucuuugaaauagcucgugu

SEQ ID NO: 94215 - RNA, 21 nt, Artificial Sequence
  LRRK2 RNA guide
auuucaaagaaugugaguacc

SEQ ID NO: 94216 - RNA, 21 nt, Artificial Sequence
  LRRK2 RNA guide
caaagaaugugaguacccuuu

SEQ ID NO: 94217 - RNA, 21 nt, Artificial Sequence
  LRRK2 RNA guide
cacacgagcuauuucaaagaa

SEQ ID NO: 94218 - RNA, 21 nt, Artificial Sequence
  LRRK2 RNA guide
cacauucuuugaaauagcucg

SEQ ID NO: 94219 - RNA, 21 nt, Artificial Sequence
  LRRK2 RNA guide
cacgagcuauuucaaagaaug

SEQ ID NO: 94220 - RNA, 21 nt, Artificial Sequence
  LRRK2 RNA guide
cauucuuugaaauagcucgug

SEQ ID NO: 94221 - RNA, 21 nt, Artificial Sequence
  LRRK2 RNA guide
cgagcuauuucaaagaaugug

SEQ ID NO: 94222 - RNA, 21 nt, Artificial Sequence
  LRRK2 RNA guide
cucacauucuuugaaauagcu

SEQ ID NO: 94223 - RNA, 21 nt, Artificial Sequence
  LRRK2 RNA guide
gaaaggguacucacauucuuu

SEQ ID NO: 94224 - RNA, 21 nt, Artificial Sequence
  LRRK2 RNA guide
gagcuauuucaaagaauguga

SEQ ID NO: 94225 - RNA, 21 nt, Artificial Sequence
  LRRK2 RNA guide
gcuauuucaaagaaugugagu

SEQ ID NO: 94226 - RNA, 21 nt, Artificial Sequence
  LRRK2 RNA guide
ggaaaggguacucacauucuu

SEQ ID NO: 94227 - RNA, 21 nt, Artificial Sequence
  LRRK2 RNA guide
ggguacucacauucuuugaaa

SEQ ID NO: 94228 - RNA, 21 nt, Artificial Sequence
  LRRK2 RNA guide
gguacucacauucuuugaaau

SEQ ID NO: 94229 - RNA, 21 nt, Artificial Sequence
  LRRK2 RNA guide
uacacacgagcuauuucaaag

SEQ ID NO: 94230 - RNA, 21 nt, Artificial Sequence
  LRRK2 RNA guide
ucaaagaaugugaguacccuu

SEQ ID NO: 94231 - RNA, 21 nt, Artificial Sequence
  LRRK2 RNA guide
ucacauucuuugaaauagcuc

SEQ ID NO: 94232 - RNA, 21 nt, Artificial Sequence
  LRRK2 RNA guide
ucuuugaaauagcucgugugu

SEQ ID NO: 94233 - RNA, 21 nt, Artificial Sequence
  LRRK2 RNA guide
uggaaaggguacucacauucu

SEQ ID NO: 94234 - RNA, 21 nt, Artificial Sequence
  LRRK2 RNA guide
uucaaagaaugugaguacccu

SEQ ID NO: 94235 - RNA, 21 nt, Artificial Sequence
  LRRK2 RNA guide
uucuuugaaauagcucgugug

SEQ ID NO: 94236 - RNA, 21 nt, Artificial Sequence
  LRRK2 RNA guide
uuucaaagaaugugaguaccc

SEQ ID NO: 94237 - RNA, 22 nt, Artificial Sequence
  LRRK2 RNA guide
aaagaaugugaguacccuuucc

SEQ ID NO: 94238 - RNA, 22 nt, Artificial Sequence
  LRRK2 RNA guide
aaaggguacucacauucuuuga

SEQ ID NO: 94239 - RNA, 22 nt, Artificial Sequence
  LRRK2 RNA guide
aagaaugugaguacccuuucca

SEQ ID NO: 94240 - RNA, 22 nt, Artificial Sequence
  LRRK2 RNA guide
aaggguacucacauucuuugaa

SEQ ID NO: 94241 - RNA, 22 nt, Artificial Sequence
  LRRK2 RNA guide
acacacgagcuauuucaaagaa

SEQ ID NO: 94242 - RNA, 22 nt, Artificial Sequence
  LRRK2 RNA guide
acacgagcuauuucaaagaaug

SEQ ID NO: 94243 - RNA, 22 nt, Artificial Sequence
  LRRK2 RNA guide
acauucuuugaaauagcucgug

SEQ ID NO: 94244 - RNA, 22 nt, Artificial Sequence
  LRRK2 RNA guide
acgagcuauuucaaagaaugug

SEQ ID NO: 94245 - RNA, 22 nt, Artificial Sequence
  LRRK2 RNA guide
acucacauucuuugaaauagcu

SEQ ID NO: 94246 - RNA, 22 nt, Artificial Sequence
  LRRK2 RNA guide
agaaugugaguacccuuuccau

SEQ ID NO: 94247 - RNA, 22 nt, Artificial Sequence
  LRRK2 RNA guide
agcuauuucaaagaaugugagu

SEQ ID NO: 94248 - RNA, 22 nt, Artificial Sequence
  LRRK2 RNA guide
aggguacucacauucuuugaaa

SEQ ID NO: 94249 - RNA, 22 nt, Artificial Sequence
  LRRK2 RNA guide
auacacacgagcuauuucaaag

SEQ ID NO: 94250 - RNA, 22 nt, Artificial Sequence
  LRRK2 RNA guide
auggaaaggguacucacauucu

SEQ ID NO: 94251 - RNA, 22 nt, Artificial Sequence
  LRRK2 RNA guide
auucuuugaaauagcucgugug

SEQ ID NO: 94252 - RNA, 22 nt, Artificial Sequence
  LRRK2 RNA guide
auuucaaagaaugugaguaccc

SEQ ID NO: 94253 - RNA, 22 nt, Artificial Sequence
  LRRK2 RNA guide
caaagaaugugaguacccuuuc

SEQ ID NO: 94254 - RNA, 22 nt, Artificial Sequence
  LRRK2 RNA guide
cacacgagcuauuucaaagaau

SEQ ID NO: 94255 - RNA, 22 nt, Artificial Sequence
  LRRK2 RNA guide
cacauucuuugaaauagcucgu

SEQ ID NO: 94256 - RNA, 22 nt, Artificial Sequence
  LRRK2 RNA guide
cacgagcuauuucaaagaaugu

SEQ ID NO: 94257 - RNA, 22 nt, Artificial Sequence
  LRRK2 RNA guide
cauggaaaggguacucacauuc

SEQ ID NO: 94258 - RNA, 22 nt, Artificial Sequence
  LRRK2 RNA guide
cauucuuugaaauagcucgugu

SEQ ID NO: 94259 - RNA, 22 nt, Artificial Sequence
  LRRK2 RNA guide
cgagcuauuucaaagaauguga

SEQ ID NO: 94260 - RNA, 22 nt, Artificial Sequence
  LRRK2 RNA guide
cuauuucaaagaaugugaguac

SEQ ID NO: 94261 - RNA, 22 nt, Artificial Sequence
  LRRK2 RNA guide
cucacauucuuugaaauagcuc

SEQ ID NO: 94262 - RNA, 22 nt, Artificial Sequence
  LRRK2 RNA guide
gaaaggguacucacauucuuug

SEQ ID NO: 94263 - RNA, 22 nt, Artificial Sequence
  LRRK2 RNA guide
gagcuauuucaaagaaugugag

SEQ ID NO: 94264 - RNA, 22 nt, Artificial Sequence
  LRRK2 RNA guide
gcuauuucaaagaaugugagua

SEQ ID NO: 94265 - RNA, 22 nt, Artificial Sequence
  LRRK2 RNA guide
ggaaaggguacucacauucuuu

SEQ ID NO: 94266 - RNA, 22 nt, Artificial Sequence
  LRRK2 RNA guide
ggguacucacauucuuugaaau

SEQ ID NO: 94267 - RNA, 22 nt, Artificial Sequence
  LRRK2 RNA guide
gguacucacauucuuugaaaua

SEQ ID NO: 94268 - RNA, 22 nt, Artificial Sequence
  LRRK2 RNA guide
guacucacauucuuugaaauag

SEQ ID NO: 94269 - RNA, 22 nt, Artificial Sequence
  LRRK2 RNA guide
uacacacgagcuauuucaaaga

SEQ ID NO: 94270 - RNA, 22 nt, Artificial Sequence
  LRRK2 RNA guide
uacucacauucuuugaaauagc

SEQ ID NO: 94271 - RNA, 22 nt, Artificial Sequence
  LRRK2 RNA guide
uauuucaaagaaugugaguacc

SEQ ID NO: 94272 - RNA, 22 nt, Artificial Sequence
  LRRK2 RNA guide
ucaaagaaugugaguacccuuu

SEQ ID NO: 94273 - RNA, 22 nt, Artificial Sequence
  LRRK2 RNA guide
ucacauucuuugaaauagcucg

SEQ ID NO: 94274 - RNA, 22 nt, Artificial Sequence
  LRRK2 RNA guide
ucuuugaaauagcucgugugua

SEQ ID NO: 94275 - RNA, 22 nt, Artificial Sequence
  LRRK2 RNA guide
uggaaaggguacucacauucuu

SEQ ID NO: 94276 - RNA, 22 nt, Artificial Sequence
  LRRK2 RNA guide
uucaaagaaugugaguacccuu

SEQ ID NO: 94277 - RNA, 22 nt, Artificial Sequence
  LRRK2 RNA guide
uucuuugaaauagcucgugugu

SEQ ID NO: 94278 - RNA, 22 nt, Artificial Sequence
  LRRK2 RNA guide
uuucaaagaaugugaguacccu

SEQ ID NO: 94279 - RNA, 20 nt, Artificial Sequence
  LRRK2 RNA guide
aaauucugugcuuaagacag

SEQ ID NO: 94280 - RNA, 20 nt, Artificial Sequence
  LRRK2 RNA guide
aagcaauaguccugucuuaa

SEQ ID NO: 94281 - RNA, 20 nt, Artificial Sequence
  LRRK2 RNA guide
aauaguccugucuuaagcac

SEQ ID NO: 94282 - RNA, 20 nt, Artificial Sequence
  LRRK2 RNA guide
aaucgacaagcaauaguccu

SEQ ID NO: 94283 - RNA, 20 nt, Artificial Sequence
  LRRK2 RNA guide
aauucugugcuuaagacagg

SEQ ID NO: 94284 - RNA, 20 nt, Artificial Sequence
  LRRK2 RNA guide
acaagcaauaguccugucuu

SEQ ID NO: 94285 - RNA, 20 nt, Artificial Sequence
  LRRK2 RNA guide
agcaauaguccugucuuaag

SEQ ID NO: 94286 - RNA, 20 nt, Artificial Sequence
  LRRK2 RNA guide
aguccugucuuaagcacaga

SEQ ID NO: 94287 - RNA, 20 nt, Artificial Sequence
  LRRK2 RNA guide
auaguccugucuuaagcaca

SEQ ID NO: 94288 - RNA, 20 nt, Artificial Sequence
  LRRK2 RNA guide
aucgacaagcaauaguccug

SEQ ID NO: 94289 - RNA, 20 nt, Artificial Sequence
  LRRK2 RNA guide
auucugugcuuaagacagga

SEQ ID NO: 94290 - RNA, 20 nt, Artificial Sequence
  LRRK2 RNA guide
caagcaauaguccugucuua

SEQ ID NO: 94291 - RNA, 20 nt, Artificial Sequence
  LRRK2 RNA guide
caauaguccugucuuaagca

SEQ ID NO: 94292 - RNA, 20 nt, Artificial Sequence
  LRRK2 RNA guide
cgacaagcaauaguccuguc

SEQ ID NO: 94293 - RNA, 20 nt, Artificial Sequence
  LRRK2 RNA guide
cugucuuaagcacagaauuu

SEQ ID NO: 94294 - RNA, 20 nt, Artificial Sequence
  LRRK2 RNA guide
cugugcuuaagacaggacua

SEQ ID NO: 94295 - RNA, 20 nt, Artificial Sequence
  LRRK2 RNA guide
cuuaagacaggacuauugcu

SEQ ID NO: 94296 - RNA, 20 nt, Artificial Sequence
  LRRK2 RNA guide
gcaauaguccugucuuaagc

SEQ ID NO: 94297 - RNA, 20 nt, Artificial Sequence
  LRRK2 RNA guide
gcuuaagacaggacuauugc

SEQ ID NO: 94298 - RNA, 20 nt, Artificial Sequence
  LRRK2 RNA guide
guccugucuuaagcacagaa

SEQ ID NO: 94299 - RNA, 20 nt, Artificial Sequence
  LRRK2 RNA guide
gucuuaagcacagaauuuaa

SEQ ID NO: 94300 - RNA, 20 nt, Artificial Sequence
  LRRK2 RNA guide
gugcuuaagacaggacuauu

SEQ ID NO: 94301 - RNA, 20 nt, Artificial Sequence
  LRRK2 RNA guide
uaaauucugugcuuaagaca

SEQ ID NO: 94302 - RNA, 20 nt, Artificial Sequence
  LRRK2 RNA guide
uaagacaggacuauugcuug

SEQ ID NO: 94303 - RNA, 20 nt, Artificial Sequence
  LRRK2 RNA guide
uccugucuuaagcacagaau

SEQ ID NO: 94304 - RNA, 20 nt, Artificial Sequence
  LRRK2 RNA guide
ucgacaagcaauaguccugu

SEQ ID NO: 94305 - RNA, 20 nt, Artificial Sequence
  LRRK2 RNA guide
ucugugcuuaagacaggacu

SEQ ID NO: 94306 - RNA, 20 nt, Artificial Sequence
  LRRK2 RNA guide
ugcuuaagacaggacuauug

SEQ ID NO: 94307 - RNA, 20 nt, Artificial Sequence
  LRRK2 RNA guide
ugucuuaagcacagaauuua

SEQ ID NO: 94308 - RNA, 20 nt, Artificial Sequence
  LRRK2 RNA guide
ugugcuuaagacaggacuau

SEQ ID NO: 94309 - RNA, 20 nt, Artificial Sequence
  LRRK2 RNA guide
uuaaauucugugcuuaagac

SEQ ID NO: 94310 - RNA, 20 nt, Artificial Sequence
  LRRK2 RNA guide
uuaagacaggacuauugcuu

SEQ ID NO: 94311 - RNA, 20 nt, Artificial Sequence
  LRRK2 RNA guide
uucugugcuuaagacaggac

SEQ ID NO: 94312 - RNA, 21 nt, Artificial Sequence
  LRRK2 RNA guide
aaaucgacaagcaauaguccu

SEQ ID NO: 94313 - RNA, 21 nt, Artificial Sequence
  LRRK2 RNA guide
aaauucugugcuuaagacagg

SEQ ID NO: 94314 - RNA, 21 nt, Artificial Sequence
  LRRK2 RNA guide
aagcaauaguccugucuuaag

SEQ ID NO: 94315 - RNA, 21 nt, Artificial Sequence
  LRRK2 RNA guide
aauaguccugucuuaagcaca

SEQ ID NO: 94316 - RNA, 21 nt, Artificial Sequence
  LRRK2 RNA guide
aaucgacaagcaauaguccug

SEQ ID NO: 94317 - RNA, 21 nt, Artificial Sequence
  LRRK2 RNA guide
aauucugugcuuaagacagga

SEQ ID NO: 94318 - RNA, 21 nt, Artificial Sequence
  LRRK2 RNA guide
acaagcaauaguccugucuua

SEQ ID NO: 94319 - RNA, 21 nt, Artificial Sequence
  LRRK2 RNA guide
agcaauaguccugucuuaagc

SEQ ID NO: 94320 - RNA, 21 nt, Artificial Sequence
  LRRK2 RNA guide
aguccugucuuaagcacagaa

SEQ ID NO: 94321 - RNA, 21 nt, Artificial Sequence
  LRRK2 RNA guide
auaguccugucuuaagcacag

SEQ ID NO: 94322 - RNA, 21 nt, Artificial Sequence
  LRRK2 RNA guide
aucgacaagcaauaguccugu

SEQ ID NO: 94323 - RNA, 21 nt, Artificial Sequence
  LRRK2 RNA guide
auucugugcuuaagacaggac

SEQ ID NO: 94324 - RNA, 21 nt, Artificial Sequence
  LRRK2 RNA guide
caagcaauaguccugucuuaa

SEQ ID NO: 94325 - RNA, 21 nt, Artificial Sequence
  LRRK2 RNA guide
caauaguccugucuuaagcac

SEQ ID NO: 94326 - RNA, 21 nt, Artificial Sequence
  LRRK2 RNA guide
ccugucuuaagcacagaauuu

SEQ ID NO: 94327 - RNA, 21 nt, Artificial Sequence
  LRRK2 RNA guide
cgacaagcaauaguccugucu

SEQ ID NO: 94328 - RNA, 21 nt, Artificial Sequence
  LRRK2 RNA guide
cugucuuaagcacagaauuua

SEQ ID NO: 94329 - RNA, 21 nt, Artificial Sequence
  LRRK2 RNA guide
cugugcuuaagacaggacuau

SEQ ID NO: 94330 - RNA, 21 nt, Artificial Sequence
  LRRK2 RNA guide
cuuaagacaggacuauugcuu

SEQ ID NO: 94331 - RNA, 21 nt, Artificial Sequence
  LRRK2 RNA guide
gacaagcaauaguccugucuu

SEQ ID NO: 94332 - RNA, 21 nt, Artificial Sequence
  LRRK2 RNA guide
gcaauaguccugucuuaagca

SEQ ID NO: 94333 - RNA, 21 nt, Artificial Sequence
  LRRK2 RNA guide
gcuuaagacaggacuauugcu

SEQ ID NO: 94334 - RNA, 21 nt, Artificial Sequence
  LRRK2 RNA guide
guccugucuuaagcacagaau

SEQ ID NO: 94335 - RNA, 21 nt, Artificial Sequence
  LRRK2 RNA guide
gugcuuaagacaggacuauug

SEQ ID NO: 94336 - RNA, 21 nt, Artificial Sequence
  LRRK2 RNA guide
uaaauucugugcuuaagacag

SEQ ID NO: 94337 - RNA, 21 nt, Artificial Sequence
  LRRK2 RNA guide
uaagacaggacuauugcuugu

SEQ ID NO: 94338 - RNA, 21 nt, Artificial Sequence
  LRRK2 RNA guide
uaguccugucuuaagcacaga

SEQ ID NO: 94339 - RNA, 21 nt, Artificial Sequence
  LRRK2 RNA guide
uccugucuuaagcacagaauu

SEQ ID NO: 94340 - RNA, 21 nt, Artificial Sequence
  LRRK2 RNA guide
ucgacaagcaauaguccuguc

SEQ ID NO: 94341 - RNA, 21 nt, Artificial Sequence
  LRRK2 RNA guide
ucugugcuuaagacaggacua

SEQ ID NO: 94342 - RNA, 21 nt, Artificial Sequence
  LRRK2 RNA guide
ugcuuaagacaggacuauugc

SEQ ID NO: 94343 - RNA, 21 nt, Artificial Sequence
  LRRK2 RNA guide
ugugcuuaagacaggacuauu

SEQ ID NO: 94344 - RNA, 21 nt, Artificial Sequence
  LRRK2 RNA guide
uuaagacaggacuauugcuug

SEQ ID NO: 94345 - RNA, 21 nt, Artificial Sequence
  LRRK2 RNA guide
uucugugcuuaagacaggacu

SEQ ID NO: 94346 - RNA, 22 nt, Artificial Sequence
  LRRK2 RNA guide
aaaaucgacaagcaauaguccu

SEQ ID NO: 94347 - RNA, 22 nt, Artificial Sequence
  LRRK2 RNA guide
aaaucgacaagcaauaguccug

SEQ ID NO: 94348 - RNA, 22 nt, Artificial Sequence
  LRRK2 RNA guide
aaauucugugcuuaagacagga

SEQ ID NO: 94349 - RNA, 22 nt, Artificial Sequence
  LRRK2 RNA guide
aagcaauaguccugucuuaagc

SEQ ID NO: 94350 - RNA, 22 nt, Artificial Sequence
  LRRK2 RNA guide
aauaguccugucuuaagcacag

SEQ ID NO: 94351 - RNA, 22 nt, Artificial Sequence
  LRRK2 RNA guide
aaucgacaagcaauaguccugu

SEQ ID NO: 94352 - RNA, 22 nt, Artificial Sequence
  LRRK2 RNA guide
aauucugugcuuaagacaggac

SEQ ID NO: 94353 - RNA, 22 nt, Artificial Sequence
  LRRK2 RNA guide
acaagcaauaguccugucuuaa

SEQ ID NO: 94354 - RNA, 22 nt, Artificial Sequence
  LRRK2 RNA guide
agcaauaguccugucuuaagca

SEQ ID NO: 94355 - RNA, 22 nt, Artificial Sequence
  LRRK2 RNA guide
aguccugucuuaagcacagaau

SEQ ID NO: 94356 - RNA, 22 nt, Artificial Sequence
  LRRK2 RNA guide
auaguccugucuuaagcacaga

SEQ ID NO: 94357 - RNA, 22 nt, Artificial Sequence
  LRRK2 RNA guide
aucgacaagcaauaguccuguc

SEQ ID NO: 94358 - RNA, 22 nt, Artificial Sequence
  LRRK2 RNA guide
auucugugcuuaagacaggacu

SEQ ID NO: 94359 - RNA, 22 nt, Artificial Sequence
  LRRK2 RNA guide
caagcaauaguccugucuuaag

SEQ ID NO: 94360 - RNA, 22 nt, Artificial Sequence
  LRRK2 RNA guide
caauaguccugucuuaagcaca

SEQ ID NO: 94361 - RNA, 22 nt, Artificial Sequence
  LRRK2 RNA guide
ccugucuuaagcacagaauuua

SEQ ID NO: 94362 - RNA, 22 nt, Artificial Sequence
  LRRK2 RNA guide
cgacaagcaauaguccugucuu

SEQ ID NO: 94363 - RNA, 22 nt, Artificial Sequence
  LRRK2 RNA guide
cugucuuaagcacagaauuuaa

SEQ ID NO: 94364 - RNA, 22 nt, Artificial Sequence
  LRRK2 RNA guide
cugugcuuaagacaggacuauu

SEQ ID NO: 94365 - RNA, 22 nt, Artificial Sequence
  LRRK2 RNA guide
cuuaagacaggacuauugcuug

SEQ ID NO: 94366 - RNA, 22 nt, Artificial Sequence
  LRRK2 RNA guide
gacaagcaauaguccugucuua

SEQ ID NO: 94367 - RNA, 22 nt, Artificial Sequence
  LRRK2 RNA guide
gcaauaguccugucuuaagcac

SEQ ID NO: 94368 - RNA, 22 nt, Artificial Sequence
  LRRK2 RNA guide
gcuuaagacaggacuauugcuu

SEQ ID NO: 94369 - RNA, 22 nt, Artificial Sequence
  LRRK2 RNA guide
guccugucuuaagcacagaauu

SEQ ID NO: 94370 - RNA, 22 nt, Artificial Sequence
  LRRK2 RNA guide
gugcuuaagacaggacuauugc

SEQ ID NO: 94371 - RNA, 22 nt, Artificial Sequence
  LRRK2 RNA guide
uaaauucugugcuuaagacagg

SEQ ID NO: 94372 - RNA, 22 nt, Artificial Sequence
  LRRK2 RNA guide
uaagacaggacuauugcuuguc

SEQ ID NO: 94373 - RNA, 22 nt, Artificial Sequence
  LRRK2 RNA guide
uaguccugucuuaagcacagaa

SEQ ID NO: 94374 - RNA, 22 nt, Artificial Sequence
  LRRK2 RNA guide
uccugucuuaagcacagaauuu

SEQ ID NO: 94375 - RNA, 22 nt, Artificial Sequence
  LRRK2 RNA guide
ucgacaagcaauaguccugucu

SEQ ID NO: 94376 - RNA, 22 nt, Artificial Sequence
  LRRK2 RNA guide
ucugugcuuaagacaggacuau

SEQ ID NO: 94377 - RNA, 22 nt, Artificial Sequence
  LRRK2 RNA guide
ugcuuaagacaggacuauugcu

SEQ ID NO: 94378 - RNA, 22 nt, Artificial Sequence
  LRRK2 RNA guide
ugugcuuaagacaggacuauug

SEQ ID NO: 94379 - RNA, 22 nt, Artificial Sequence
  LRRK2 RNA guide
uuaaauucugugcuuaagacag

SEQ ID NO: 94380 - RNA, 22 nt, Artificial Sequence
  LRRK2 RNA guide
uuaagacaggacuauugcuugu

SEQ ID NO: 94381 - RNA, 22 nt, Artificial Sequence
  LRRK2 RNA guide
uucugugcuuaagacaggacua

SEQ ID NO: 94382 - RNA, 20 nt, Artificial Sequence
  LRRK2 RNA guide
aaauucugugcuucagacag

SEQ ID NO: 94383 - RNA, 20 nt, Artificial Sequence
  LRRK2 RNA guide
aagcaauaguccugucugaa

SEQ ID NO: 94384 - RNA, 20 nt, Artificial Sequence
  LRRK2 RNA guide
aauaguccugucugaagcac

SEQ ID NO: 94385 - RNA, 20 nt, Artificial Sequence
  LRRK2 RNA guide
aauucugugcuucagacagg

SEQ ID NO: 94386 - RNA, 20 nt, Artificial Sequence
  LRRK2 RNA guide
acaagcaauaguccugucug

SEQ ID NO: 94387 - RNA, 20 nt, Artificial Sequence
  LRRK2 RNA guide
agcaauaguccugucugaag

SEQ ID NO: 94388 - RNA, 20 nt, Artificial Sequence
  LRRK2 RNA guide
aguccugucugaagcacaga

SEQ ID NO: 94389 - RNA, 20 nt, Artificial Sequence
  LRRK2 RNA guide
auaguccugucugaagcaca

SEQ ID NO: 94390 - RNA, 20 nt, Artificial Sequence
  LRRK2 RNA guide
auucugugcuucagacagga

SEQ ID NO: 94391 - RNA, 20 nt, Artificial Sequence
  LRRK2 RNA guide
caagcaauaguccugucuga

SEQ ID NO: 94392 - RNA, 20 nt, Artificial Sequence
  LRRK2 RNA guide
caauaguccugucugaagca

SEQ ID NO: 94393 - RNA, 20 nt, Artificial Sequence
  LRRK2 RNA guide
ccugucugaagcacagaauu

SEQ ID NO: 94394 - RNA, 20 nt, Artificial Sequence
  LRRK2 RNA guide
cugaagcacagaauuuaaaa

SEQ ID NO: 94395 - RNA, 20 nt, Artificial Sequence
  LRRK2 RNA guide
cugucugaagcacagaauuu

SEQ ID NO: 94396 - RNA, 20 nt, Artificial Sequence
  LRRK2 RNA guide
cugugcuucagacaggacua

SEQ ID NO: 94397 - RNA, 20 nt, Artificial Sequence
  LRRK2 RNA guide
cuucagacaggacuauugcu

SEQ ID NO: 94398 - RNA, 20 nt, Artificial Sequence
  LRRK2 RNA guide
gcaauaguccugucugaagc

SEQ ID NO: 94399 - RNA, 20 nt, Artificial Sequence
  LRRK2 RNA guide
gcuucagacaggacuauugc

SEQ ID NO: 94400 - RNA, 20 nt, Artificial Sequence
  LRRK2 RNA guide
guccugucugaagcacagaa

SEQ ID NO: 94401 - RNA, 20 nt, Artificial Sequence
  LRRK2 RNA guide
gucugaagcacagaauuuaa

SEQ ID NO: 94402 - RNA, 20 nt, Artificial Sequence
  LRRK2 RNA guide
gugcuucagacaggacuauu

SEQ ID NO: 94403 - RNA, 20 nt, Artificial Sequence
  LRRK2 RNA guide
uaaauucugugcuucagaca

SEQ ID NO: 94404 - RNA, 20 nt, Artificial Sequence
  LRRK2 RNA guide
uaguccugucugaagcacag

SEQ ID NO: 94405 - RNA, 20 nt, Artificial Sequence
  LRRK2 RNA guide
ucagacaggacuauugcuug

SEQ ID NO: 94406 - RNA, 20 nt, Artificial Sequence
  LRRK2 RNA guide
uccugucugaagcacagaau

SEQ ID NO: 94407 - RNA, 20 nt, Artificial Sequence
  LRRK2 RNA guide
ucugaagcacagaauuuaaa

SEQ ID NO: 94408 - RNA, 20 nt, Artificial Sequence
  LRRK2 RNA guide
ucugugcuucagacaggacu

SEQ ID NO: 94409 - RNA, 20 nt, Artificial Sequence
  LRRK2 RNA guide
ugcuucagacaggacuauug

SEQ ID NO: 94410 - RNA, 20 nt, Artificial Sequence
  LRRK2 RNA guide
ugucugaagcacagaauuua

SEQ ID NO: 94411 - RNA, 20 nt, Artificial Sequence
  LRRK2 RNA guide
ugugcuucagacaggacuau

SEQ ID NO: 94412 - RNA, 20 nt, Artificial Sequence
  LRRK2 RNA guide
uuaaauucugugcuucagac

SEQ ID NO: 94413 - RNA, 20 nt, Artificial Sequence
  LRRK2 RNA guide
uucagacaggacuauugcuu

SEQ ID NO: 94414 - RNA, 20 nt, Artificial Sequence
  LRRK2 RNA guide
uucugugcuucagacaggac

SEQ ID NO: 94415 - RNA, 20 nt, Artificial Sequence
  LRRK2 RNA guide
uuuaaauucugugcuucaga

SEQ ID NO: 94416 - RNA, 20 nt, Artificial Sequence
  LRRK2 RNA guide
uuuuaaauucugugcuucag

SEQ ID NO: 94417 - RNA, 21 nt, Artificial Sequence
  LRRK2 RNA guide
aaauucugugcuucagacagg

SEQ ID NO: 94418 - RNA, 21 nt, Artificial Sequence
  LRRK2 RNA guide
aagcaauaguccugucugaag

SEQ ID NO: 94419 - RNA, 21 nt, Artificial Sequence
  LRRK2 RNA guide
aauaguccugucugaagcaca

SEQ ID NO: 94420 - RNA, 21 nt, Artificial Sequence
  LRRK2 RNA guide
aauucugugcuucagacagga

SEQ ID NO: 94421 - RNA, 21 nt, Artificial Sequence
  LRRK2 RNA guide
acaagcaauaguccugucuga

SEQ ID NO: 94422 - RNA, 21 nt, Artificial Sequence
  LRRK2 RNA guide
agcaauaguccugucugaagc

SEQ ID NO: 94423 - RNA, 21 nt, Artificial Sequence
  LRRK2 RNA guide
aguccugucugaagcacagaa

SEQ ID NO: 94424 - RNA, 21 nt, Artificial Sequence
  LRRK2 RNA guide
auaguccugucugaagcacag

SEQ ID NO: 94425 - RNA, 21 nt, Artificial Sequence
  LRRK2 RNA guide
auucugugcuucagacaggac

SEQ ID NO: 94426 - RNA, 21 nt, Artificial Sequence
  LRRK2 RNA guide
caagcaauaguccugucugaa

SEQ ID NO: 94427 - RNA, 21 nt, Artificial Sequence
  LRRK2 RNA guide
caauaguccugucugaagcac

SEQ ID NO: 94428 - RNA, 21 nt, Artificial Sequence
  LRRK2 RNA guide
ccugucugaagcacagaauuu

SEQ ID NO: 94429 - RNA, 21 nt, Artificial Sequence
  LRRK2 RNA guide
cugucugaagcacagaauuua

SEQ ID NO: 94430 - RNA, 21 nt, Artificial Sequence
  LRRK2 RNA guide
cugugcuucagacaggacuau

SEQ ID NO: 94431 - RNA, 21 nt, Artificial Sequence
  LRRK2 RNA guide
cuucagacaggacuauugcuu

SEQ ID NO: 94432 - RNA, 21 nt, Artificial Sequence
  LRRK2 RNA guide
gacaagcaauaguccugucug

SEQ ID NO: 94433 - RNA, 21 nt, Artificial Sequence
  LRRK2 RNA guide
gcaauaguccugucugaagca

SEQ ID NO: 94434 - RNA, 21 nt, Artificial Sequence
  LRRK2 RNA guide
gcuucagacaggacuauugcu

SEQ ID NO: 94435 - RNA, 21 nt, Artificial Sequence
  LRRK2 RNA guide
guccugucugaagcacagaau

SEQ ID NO: 94436 - RNA, 21 nt, Artificial Sequence
  LRRK2 RNA guide
gucugaagcacagaauuuaaa

SEQ ID NO: 94437 - RNA, 21 nt, Artificial Sequence
  LRRK2 RNA guide
gugcuucagacaggacuauug

SEQ ID NO: 94438 - RNA, 21 nt, Artificial Sequence
  LRRK2 RNA guide
uaaauucugugcuucagacag

SEQ ID NO: 94439 - RNA, 21 nt, Artificial Sequence
  LRRK2 RNA guide
uaguccugucugaagcacaga

SEQ ID NO: 94440 - RNA, 21 nt, Artificial Sequence
  LRRK2 RNA guide
ucagacaggacuauugcuugu

SEQ ID NO: 94441 - RNA, 21 nt, Artificial Sequence
  LRRK2 RNA guide
uccugucugaagcacagaauu

SEQ ID NO: 94442 - RNA, 21 nt, Artificial Sequence
  LRRK2 RNA guide
ucugugcuucagacaggacua

SEQ ID NO: 94443 - RNA, 21 nt, Artificial Sequence
  LRRK2 RNA guide
ugcuucagacaggacuauugc

SEQ ID NO: 94444 - RNA, 21 nt, Artificial Sequence
  LRRK2 RNA guide
ugucugaagcacagaauuuaa

SEQ ID NO: 94445 - RNA, 21 nt, Artificial Sequence
  LRRK2 RNA guide
ugugcuucagacaggacuauu

SEQ ID NO: 94446 - RNA, 21 nt, Artificial Sequence
  LRRK2 RNA guide
uuaaauucugugcuucagaca

SEQ ID NO: 94447 - RNA, 21 nt, Artificial Sequence
  LRRK2 RNA guide
uucagacaggacuauugcuug

SEQ ID NO: 94448 - RNA, 21 nt, Artificial Sequence
  LRRK2 RNA guide
uucugugcuucagacaggacu

SEQ ID NO: 94449 - RNA, 21 nt, Artificial Sequence
  LRRK2 RNA guide
uuuaaauucugugcuucagac

SEQ ID NO: 94450 - RNA, 22 nt, Artificial Sequence
  LRRK2 RNA guide
aaauucugugcuucagacagga

SEQ ID NO: 94451 - RNA, 22 nt, Artificial Sequence
  LRRK2 RNA guide
aagcaauaguccugucugaagc

SEQ ID NO: 94452 - RNA, 22 nt, Artificial Sequence
  LRRK2 RNA guide
aauaguccugucugaagcacag

SEQ ID NO: 94453 - RNA, 22 nt, Artificial Sequence
  LRRK2 RNA guide
aauucugugcuucagacaggac

SEQ ID NO: 94454 - RNA, 22 nt, Artificial Sequence
  LRRK2 RNA guide
acaagcaauaguccugucugaa

SEQ ID NO: 94455 - RNA, 22 nt, Artificial Sequence
  LRRK2 RNA guide
agcaauaguccugucugaagca

SEQ ID NO: 94456 - RNA, 22 nt, Artificial Sequence
  LRRK2 RNA guide
aguccugucugaagcacagaau

SEQ ID NO: 94457 - RNA, 22 nt, Artificial Sequence
  LRRK2 RNA guide
auaguccugucugaagcacaga

SEQ ID NO: 94458 - RNA, 22 nt, Artificial Sequence
  LRRK2 RNA guide
auucugugcuucagacaggacu

SEQ ID NO: 94459 - RNA, 22 nt, Artificial Sequence
  LRRK2 RNA guide
caagcaauaguccugucugaag

SEQ ID NO: 94460 - RNA, 22 nt, Artificial Sequence
  LRRK2 RNA guide
caauaguccugucugaagcaca

SEQ ID NO: 94461 - RNA, 22 nt, Artificial Sequence
  LRRK2 RNA guide
ccugucugaagcacagaauuua

SEQ ID NO: 94462 - RNA, 22 nt, Artificial Sequence
  LRRK2 RNA guide
cgacaagcaauaguccugucug

SEQ ID NO: 94463 - RNA, 22 nt, Artificial Sequence
  LRRK2 RNA guide
cugucugaagcacagaauuuaa

SEQ ID NO: 94464 - RNA, 22 nt, Artificial Sequence
  LRRK2 RNA guide
cugugcuucagacaggacuauu

SEQ ID NO: 94465 - RNA, 22 nt, Artificial Sequence
  LRRK2 RNA guide
cuucagacaggacuauugcuug

SEQ ID NO: 94466 - RNA, 22 nt, Artificial Sequence
  LRRK2 RNA guide
gacaagcaauaguccugucuga

SEQ ID NO: 94467 - RNA, 22 nt, Artificial Sequence
  LRRK2 RNA guide
gcaauaguccugucugaagcac

SEQ ID NO: 94468 - RNA, 22 nt, Artificial Sequence
  LRRK2 RNA guide
gcuucagacaggacuauugcuu

SEQ ID NO: 94469 - RNA, 22 nt, Artificial Sequence
  LRRK2 RNA guide
guccugucugaagcacagaauu

SEQ ID NO: 94470 - RNA, 22 nt, Artificial Sequence
  LRRK2 RNA guide
gucugaagcacagaauuuaaaa

SEQ ID NO: 94471 - RNA, 22 nt, Artificial Sequence
  LRRK2 RNA guide
gugcuucagacaggacuauugc

SEQ ID NO: 94472 - RNA, 22 nt, Artificial Sequence
  LRRK2 RNA guide
uaaauucugugcuucagacagg

SEQ ID NO: 94473 - RNA, 22 nt, Artificial Sequence
  LRRK2 RNA guide
uaguccugucugaagcacagaa

SEQ ID NO: 94474 - RNA, 22 nt, Artificial Sequence
  LRRK2 RNA guide
ucagacaggacuauugcuuguc

SEQ ID NO: 94475 - RNA, 22 nt, Artificial Sequence
  LRRK2 RNA guide
uccugucugaagcacagaauuu

SEQ ID NO: 94476 - RNA, 22 nt, Artificial Sequence
  LRRK2 RNA guide
ucugugcuucagacaggacuau

SEQ ID NO: 94477 - RNA, 22 nt, Artificial Sequence
  LRRK2 RNA guide
ugcuucagacaggacuauugcu

SEQ ID NO: 94478 - RNA, 22 nt, Artificial Sequence
  LRRK2 RNA guide
ugucugaagcacagaauuuaaa

SEQ ID NO: 94479 - RNA, 22 nt, Artificial Sequence
  LRRK2 RNA guide
ugugcuucagacaggacuauug

SEQ ID NO: 94480 - RNA, 22 nt, Artificial Sequence
  LRRK2 RNA guide
uuaaauucugugcuucagacag

SEQ ID NO: 94481 - RNA, 22 nt, Artificial Sequence
  LRRK2 RNA guide
uucagacaggacuauugcuugu

SEQ ID NO: 94482 - RNA, 22 nt, Artificial Sequence
  LRRK2 RNA guide
uucugugcuucagacaggacua

SEQ ID NO: 94483 - RNA, 22 nt, Artificial Sequence
  LRRK2 RNA guide
uuuaaauucugugcuucagaca

SEQ ID NO: 94484 - RNA, 22 nt, Artificial Sequence
  LRRK2 RNA guide
uuuuaaauucugugcuucagac

SEQ ID NO: 94485 - RNA, 20 nt, Artificial Sequence
  LRRK2 RNA guide
aaaaaucgacaagcaauagu

SEQ ID NO: 94486 - RNA, 20 nt, Artificial Sequence
  LRRK2 RNA guide
aaaaucgacaagcaauaguc

SEQ ID NO: 94487 - RNA, 20 nt, Artificial Sequence
  LRRK2 RNA guide
aaaucgacaagcaauagucc

SEQ ID NO: 94488 - RNA, 20 nt, Artificial Sequence
  LRRK2 RNA guide
aagacaggacuauugcuugu

SEQ ID NO: 94489 - RNA, 20 nt, Artificial Sequence
  LRRK2 RNA guide
acaggacuauugcuugucga

SEQ ID NO: 94490 - RNA, 20 nt, Artificial Sequence
  LRRK2 RNA guide
accgugcagauuucuagaaa

SEQ ID NO: 94491 - RNA, 20 nt, Artificial Sequence
  LRRK2 RNA guide
acuauugcuugucgauuuuu

SEQ ID NO: 94492 - RNA, 20 nt, Artificial Sequence
  LRRK2 RNA guide
agacaggacuauugcuuguc

SEQ ID NO: 94493 - RNA, 20 nt, Artificial Sequence
  LRRK2 RNA guide
agauuucuagaaaaaucgac

SEQ ID NO: 94494 - RNA, 20 nt, Artificial Sequence
  LRRK2 RNA guide
aggacuauugcuugucgauu

SEQ ID NO: 94495 - RNA, 20 nt, Artificial Sequence
  LRRK2 RNA guide
auugcuugucgauuuuucua

SEQ ID NO: 94496 - RNA, 20 nt, Artificial Sequence
  LRRK2 RNA guide
cagauuucuagaaaaaucga

SEQ ID NO: 94497 - RNA, 20 nt, Artificial Sequence
  LRRK2 RNA guide
caggacuauugcuugucgau

SEQ ID NO: 94498 - RNA, 20 nt, Artificial Sequence
  LRRK2 RNA guide
ccgugcagauuucuagaaaa

SEQ ID NO: 94499 - RNA, 20 nt, Artificial Sequence
  LRRK2 RNA guide
cgugcagauuucuagaaaaa

SEQ ID NO: 94500 - RNA, 20 nt, Artificial Sequence
  LRRK2 RNA guide
cuagaaaaaucgacaagcaa

SEQ ID NO: 94501 - RNA, 20 nt, Artificial Sequence
  LRRK2 RNA guide
cuauugcuugucgauuuuuc

SEQ ID NO: 94502 - RNA, 20 nt, Artificial Sequence
  LRRK2 RNA guide
cuugucgauuuuucuagaaa

SEQ ID NO: 94503 - RNA, 20 nt, Artificial Sequence
  LRRK2 RNA guide
gaaaaaucgacaagcaauag

SEQ ID NO: 94504 - RNA, 20 nt, Artificial Sequence
  LRRK2 RNA guide
gacaggacuauugcuugucg

SEQ ID NO: 94505 - RNA, 20 nt, Artificial Sequence
  LRRK2 RNA guide
gacuauugcuugucgauuuu

SEQ ID NO: 94506 - RNA, 20 nt, Artificial Sequence
  LRRK2 RNA guide
gauuucuagaaaaaucgaca

SEQ ID NO: 94507 - RNA, 20 nt, Artificial Sequence
  LRRK2 RNA guide
gcagauuucuagaaaaaucg

SEQ ID NO: 94508 - RNA, 20 nt, Artificial Sequence
  LRRK2 RNA guide
gcuugucgauuuuucuagaa

SEQ ID NO: 94509 - RNA, 20 nt, Artificial Sequence
  LRRK2 RNA guide
ggacuauugcuugucgauuu

SEQ ID NO: 94510 - RNA, 20 nt, Artificial Sequence
  LRRK2 RNA guide
gugcagauuucuagaaaaau

SEQ ID NO: 94511 - RNA, 20 nt, Artificial Sequence
  LRRK2 RNA guide
uagaaaaaucgacaagcaau

SEQ ID NO: 94512 - RNA, 20 nt, Artificial Sequence
  LRRK2 RNA guide
uauugcuugucgauuuuucu

SEQ ID NO: 94513 - RNA, 20 nt, Artificial Sequence
  LRRK2 RNA guide
ucuagaaaaaucgacaagca

SEQ ID NO: 94514 - RNA, 20 nt, Artificial Sequence
  LRRK2 RNA guide
ugcuugucgauuuuucuaga

SEQ ID NO: 94515 - RNA, 20 nt, Artificial Sequence
  LRRK2 RNA guide
uucuagaaaaaucgacaagc

SEQ ID NO: 94516 - RNA, 20 nt, Artificial Sequence
  LRRK2 RNA guide
uugcuugucgauuuuucuag

SEQ ID NO: 94517 - RNA, 20 nt, Artificial Sequence
  LRRK2 RNA guide
uuucuagaaaaaucgacaag

SEQ ID NO: 94518 - RNA, 21 nt, Artificial Sequence
  LRRK2 RNA guide
aaaaaucgacaagcaauaguc

SEQ ID NO: 94519 - RNA, 21 nt, Artificial Sequence
  LRRK2 RNA guide
aaaaucgacaagcaauagucc

SEQ ID NO: 94520 - RNA, 21 nt, Artificial Sequence
  LRRK2 RNA guide
aagacaggacuauugcuuguc

SEQ ID NO: 94521 - RNA, 21 nt, Artificial Sequence
  LRRK2 RNA guide
acaggacuauugcuugucgau

SEQ ID NO: 94522 - RNA, 21 nt, Artificial Sequence
  LRRK2 RNA guide
accgugcagauuucuagaaaa

SEQ ID NO: 94523 - RNA, 21 nt, Artificial Sequence
  LRRK2 RNA guide
acuauugcuugucgauuuuuc

SEQ ID NO: 94524 - RNA, 21 nt, Artificial Sequence
  LRRK2 RNA guide
agaaaaaucgacaagcaauag

SEQ ID NO: 94525 - RNA, 21 nt, Artificial Sequence
  LRRK2 RNA guide
agacaggacuauugcuugucg

SEQ ID NO: 94526 - RNA, 21 nt, Artificial Sequence
  LRRK2 RNA guide
aggacuauugcuugucgauuu

SEQ ID NO: 94527 - RNA, 21 nt, Artificial Sequence
  LRRK2 RNA guide
auugcuugucgauuuuucuag

SEQ ID NO: 94528 - RNA, 21 nt, Artificial Sequence
  LRRK2 RNA guide
cagauuucuagaaaaaucgac

SEQ ID NO: 94529 - RNA, 21 nt, Artificial Sequence
  LRRK2 RNA guide
caggacuauugcuugucgauu

SEQ ID NO: 94530 - RNA, 21 nt, Artificial Sequence
  LRRK2 RNA guide
ccgugcagauuucuagaaaaa

SEQ ID NO: 94531 - RNA, 21 nt, Artificial Sequence
  LRRK2 RNA guide
cgugcagauuucuagaaaaau

SEQ ID NO: 94532 - RNA, 21 nt, Artificial Sequence
  LRRK2 RNA guide
cuagaaaaaucgacaagcaau

SEQ ID NO: 94533 - RNA, 21 nt, Artificial Sequence
  LRRK2 RNA guide
cuauugcuugucgauuuuucu

SEQ ID NO: 94534 - RNA, 21 nt, Artificial Sequence
  LRRK2 RNA guide
gaaaaaucgacaagcaauagu

SEQ ID NO: 94535 - RNA, 21 nt, Artificial Sequence
  LRRK2 RNA guide
gacaggacuauugcuugucga

SEQ ID NO: 94536 - RNA, 21 nt, Artificial Sequence
  LRRK2 RNA guide
gacuauugcuugucgauuuuu

SEQ ID NO: 94537 - RNA, 21 nt, Artificial Sequence
  LRRK2 RNA guide
gcagauuucuagaaaaaucga

SEQ ID NO: 94538 - RNA, 21 nt, Artificial Sequence
  LRRK2 RNA guide
gcuugucgauuuuucuagaaa

SEQ ID NO: 94539 - RNA, 21 nt, Artificial Sequence
  LRRK2 RNA guide
ggacuauugcuugucgauuuu

SEQ ID NO: 94540 - RNA, 21 nt, Artificial Sequence
  LRRK2 RNA guide
gugcagauuucuagaaaaauc

SEQ ID NO: 94541 - RNA, 21 nt, Artificial Sequence
  LRRK2 RNA guide
uaccgugcagauuucuagaaa

SEQ ID NO: 94542 - RNA, 21 nt, Artificial Sequence
  LRRK2 RNA guide
ucuagaaaaaucgacaagcaa

SEQ ID NO: 94543 - RNA, 21 nt, Artificial Sequence
  LRRK2 RNA guide
ugcagauuucuagaaaaaucg

SEQ ID NO: 94544 - RNA, 21 nt, Artificial Sequence
  LRRK2 RNA guide
ugcuugucgauuuuucuagaa

SEQ ID NO: 94545 - RNA, 21 nt, Artificial Sequence
  LRRK2 RNA guide
uucuagaaaaaucgacaagca

SEQ ID NO: 94546 - RNA, 21 nt, Artificial Sequence
  LRRK2 RNA guide
uugcuugucgauuuuucuaga

SEQ ID NO: 94547 - RNA, 21 nt, Artificial Sequence
  LRRK2 RNA guide
uuucuagaaaaaucgacaagc

SEQ ID NO: 94548 - RNA, 22 nt, Artificial Sequence
  LRRK2 RNA guide
aaaaaucgacaagcaauagucc

SEQ ID NO: 94549 - RNA, 22 nt, Artificial Sequence
  LRRK2 RNA guide
aagacaggacuauugcuugucg

SEQ ID NO: 94550 - RNA, 22 nt, Artificial Sequence
  LRRK2 RNA guide
acaggacuauugcuugucgauu

SEQ ID NO: 94551 - RNA, 22 nt, Artificial Sequence
  LRRK2 RNA guide
accgugcagauuucuagaaaaa

SEQ ID NO: 94552 - RNA, 22 nt, Artificial Sequence
  LRRK2 RNA guide
acuauugcuugucgauuuuucu

SEQ ID NO: 94553 - RNA, 22 nt, Artificial Sequence
  LRRK2 RNA guide
agaaaaaucgacaagcaauagu

SEQ ID NO: 94554 - RNA, 22 nt, Artificial Sequence
  LRRK2 RNA guide
agacaggacuauugcuugucga

SEQ ID NO: 94555 - RNA, 22 nt, Artificial Sequence
  LRRK2 RNA guide
aggacuauugcuugucgauuuu

SEQ ID NO: 94556 - RNA, 22 nt, Artificial Sequence
  LRRK2 RNA guide
auaccgugcagauuucuagaaa

SEQ ID NO: 94557 - RNA, 22 nt, Artificial Sequence
  LRRK2 RNA guide
auugcuugucgauuuuucuaga

SEQ ID NO: 94558 - RNA, 22 nt, Artificial Sequence
  LRRK2 RNA guide
auuucuagaaaaaucgacaagc

SEQ ID NO: 94559 - RNA, 22 nt, Artificial Sequence
  LRRK2 RNA guide
cagauuucuagaaaaaucgaca

SEQ ID NO: 94560 - RNA, 22 nt, Artificial Sequence
  LRRK2 RNA guide
caggacuauugcuugucgauuu

SEQ ID NO: 94561 - RNA, 22 nt, Artificial Sequence
  LRRK2 RNA guide
ccgugcagauuucuagaaaaau

SEQ ID NO: 94562 - RNA, 22 nt, Artificial Sequence
  LRRK2 RNA guide
cgugcagauuucuagaaaaauc

SEQ ID NO: 94563 - RNA, 22 nt, Artificial Sequence
  LRRK2 RNA guide
cuagaaaaaucgacaagcaaua

SEQ ID NO: 94564 - RNA, 22 nt, Artificial Sequence
  LRRK2 RNA guide
cuauugcuugucgauuuuucua

SEQ ID NO: 94565 - RNA, 22 nt, Artificial Sequence
  LRRK2 RNA guide
gaaaaaucgacaagcaauaguc

SEQ ID NO: 94566 - RNA, 22 nt, Artificial Sequence
  LRRK2 RNA guide
gacaggacuauugcuugucgau

SEQ ID NO: 94567 - RNA, 22 nt, Artificial Sequence
  LRRK2 RNA guide
gacuauugcuugucgauuuuuc

SEQ ID NO: 94568 - RNA, 22 nt, Artificial Sequence
  LRRK2 RNA guide
gauuucuagaaaaaucgacaag

SEQ ID NO: 94569 - RNA, 22 nt, Artificial Sequence
  LRRK2 RNA guide
gcagauuucuagaaaaaucgac

SEQ ID NO: 94570 - RNA, 22 nt, Artificial Sequence
  LRRK2 RNA guide
gcuugucgauuuuucuagaaau

SEQ ID NO: 94571 - RNA, 22 nt, Artificial Sequence
  LRRK2 RNA guide
ggacuauugcuugucgauuuuu

SEQ ID NO: 94572 - RNA, 22 nt, Artificial Sequence
  LRRK2 RNA guide
gugcagauuucuagaaaaaucg

SEQ ID NO: 94573 - RNA, 22 nt, Artificial Sequence
  LRRK2 RNA guide
uaccgugcagauuucuagaaaa

SEQ ID NO: 94574 - RNA, 22 nt, Artificial Sequence
  LRRK2 RNA guide
uagaaaaaucgacaagcaauag

SEQ ID NO: 94575 - RNA, 22 nt, Artificial Sequence
  LRRK2 RNA guide
uauugcuugucgauuuuucuag

SEQ ID NO: 94576 - RNA, 22 nt, Artificial Sequence
  LRRK2 RNA guide
ucuagaaaaaucgacaagcaau

SEQ ID NO: 94577 - RNA, 22 nt, Artificial Sequence
  LRRK2 RNA guide
ugcagauuucuagaaaaaucga

SEQ ID NO: 94578 - RNA, 22 nt, Artificial Sequence
  LRRK2 RNA guide
ugcuugucgauuuuucuagaaa

SEQ ID NO: 94579 - RNA, 22 nt, Artificial Sequence
  LRRK2 RNA guide
uucuagaaaaaucgacaagcaa

SEQ ID NO: 94580 - RNA, 22 nt, Artificial Sequence
  LRRK2 RNA guide
uugcuugucgauuuuucuagaa

SEQ ID NO: 94581 - RNA, 22 nt, Artificial Sequence
  LRRK2 RNA guide
uuucuagaaaaaucgacaagca

SEQ ID NO: 94582 - RNA, 20 nt, Artificial Sequence
  LRRK2 RNA guide
aaaaucaacaagcaauaguc

SEQ ID NO: 94583 - RNA, 20 nt, Artificial Sequence
  LRRK2 RNA guide
aaaucaacaagcaauagucc

SEQ ID NO: 94584 - RNA, 20 nt, Artificial Sequence
  LRRK2 RNA guide
aaucaacaagcaauaguccu

SEQ ID NO: 94585 - RNA, 20 nt, Artificial Sequence
  LRRK2 RNA guide
acaggacuauugcuuguuga

SEQ ID NO: 94586 - RNA, 20 nt, Artificial Sequence
  LRRK2 RNA guide
agacaggacuauugcuuguu

SEQ ID NO: 94587 - RNA, 20 nt, Artificial Sequence
  LRRK2 RNA guide
aggacuauugcuuguugauu

SEQ ID NO: 94588 - RNA, 20 nt, Artificial Sequence
  LRRK2 RNA guide
aucaacaagcaauaguccug

SEQ ID NO: 94589 - RNA, 20 nt, Artificial Sequence
  LRRK2 RNA guide
caacaagcaauaguccuguc

SEQ ID NO: 94590 - RNA, 20 nt, Artificial Sequence
  LRRK2 RNA guide
caggacuauugcuuguugau

SEQ ID NO: 94591 - RNA, 20 nt, Artificial Sequence
  LRRK2 RNA guide
cuagaaaaaucaacaagcaa

SEQ ID NO: 94592 - RNA, 20 nt, Artificial Sequence
  LRRK2 RNA guide
cuauugcuuguugauuuuuc

SEQ ID NO: 94593 - RNA, 20 nt, Artificial Sequence
  LRRK2 RNA guide
gaaaaaucaacaagcaauag

SEQ ID NO: 94594 - RNA, 20 nt, Artificial Sequence
  LRRK2 RNA guide
gacaggacuauugcuuguug

SEQ ID NO: 94595 - RNA, 20 nt, Artificial Sequence
  LRRK2 RNA guide
gacuauugcuuguugauuuu

SEQ ID NO: 94596 - RNA, 20 nt, Artificial Sequence
  LRRK2 RNA guide
gcagauuucuagaaaaauca

SEQ ID NO: 94597 - RNA, 20 nt, Artificial Sequence
  LRRK2 RNA guide
gcuuguugauuuuucuagaa

SEQ ID NO: 94598 - RNA, 20 nt, Artificial Sequence
  LRRK2 RNA guide
ggacuauugcuuguugauuu

SEQ ID NO: 94599 - RNA, 20 nt, Artificial Sequence
  LRRK2 RNA guide
ucaacaagcaauaguccugu

SEQ ID NO: 94600 - RNA, 20 nt, Artificial Sequence
  LRRK2 RNA guide
ucuagaaaaaucaacaagca

SEQ ID NO: 94601 - RNA, 20 nt, Artificial Sequence
  LRRK2 RNA guide
ugcuuguugauuuuucuaga

SEQ ID NO: 94602 - RNA, 20 nt, Artificial Sequence
  LRRK2 RNA guide
uucuagaaaaaucaacaagc

SEQ ID NO: 94603 - RNA, 20 nt, Artificial Sequence
  LRRK2 RNA guide
uugcuuguugauuuuucuag

SEQ ID NO: 94604 - RNA, 21 nt, Artificial Sequence
  LRRK2 RNA guide
aaaaucaacaagcaauagucc

SEQ ID NO: 94605 - RNA, 21 nt, Artificial Sequence
  LRRK2 RNA guide
aaaucaacaagcaauaguccu

SEQ ID NO: 94606 - RNA, 21 nt, Artificial Sequence
  LRRK2 RNA guide
aagacaggacuauugcuuguu

SEQ ID NO: 94607 - RNA, 21 nt, Artificial Sequence
  LRRK2 RNA guide
aaucaacaagcaauaguccug

SEQ ID NO: 94608 - RNA, 21 nt, Artificial Sequence
  LRRK2 RNA guide
acaggacuauugcuuguugau

SEQ ID NO: 94609 - RNA, 21 nt, Artificial Sequence
  LRRK2 RNA guide
agacaggacuauugcuuguug

SEQ ID NO: 94610 - RNA, 21 nt, Artificial Sequence
  LRRK2 RNA guide
aggacuauugcuuguugauuu

SEQ ID NO: 94611 - RNA, 21 nt, Artificial Sequence
  LRRK2 RNA guide
aucaacaagcaauaguccugu

SEQ ID NO: 94612 - RNA, 21 nt, Artificial Sequence
  LRRK2 RNA guide
caacaagcaauaguccugucu

SEQ ID NO: 94613 - RNA, 21 nt, Artificial Sequence
  LRRK2 RNA guide
caggacuauugcuuguugauu

SEQ ID NO: 94614 - RNA, 21 nt, Artificial Sequence
  LRRK2 RNA guide
gacaggacuauugcuuguuga

SEQ ID NO: 94615 - RNA, 21 nt, Artificial Sequence
  LRRK2 RNA guide
ggacuauugcuuguugauuuu

SEQ ID NO: 94616 - RNA, 21 nt, Artificial Sequence
  LRRK2 RNA guide
ucaacaagcaauaguccuguc

SEQ ID NO: 94617 - RNA, 22 nt, Artificial Sequence
  LRRK2 RNA guide
aaaaaucaacaagcaauagucc

SEQ ID NO: 94618 - RNA, 22 nt, Artificial Sequence
  LRRK2 RNA guide
aaaaucaacaagcaauaguccu

SEQ ID NO: 94619 - RNA, 22 nt, Artificial Sequence
  LRRK2 RNA guide
aaaucaacaagcaauaguccug

SEQ ID NO: 94620 - RNA, 22 nt, Artificial Sequence
  LRRK2 RNA guide
aagacaggacuauugcuuguug

SEQ ID NO: 94621 - RNA, 22 nt, Artificial Sequence
  LRRK2 RNA guide
aaucaacaagcaauaguccugu

SEQ ID NO: 94622 - RNA, 22 nt, Artificial Sequence
  LRRK2 RNA guide
acaggacuauugcuuguugauu

SEQ ID NO: 94623 - RNA, 22 nt, Artificial Sequence
  LRRK2 RNA guide
agacaggacuauugcuuguuga

SEQ ID NO: 94624 - RNA, 22 nt, Artificial Sequence
  LRRK2 RNA guide
aggacuauugcuuguugauuuu

SEQ ID NO: 94625 - RNA, 22 nt, Artificial Sequence
  LRRK2 RNA guide
aucaacaagcaauaguccuguc

SEQ ID NO: 94626 - RNA, 22 nt, Artificial Sequence
  LRRK2 RNA guide
caacaagcaauaguccugucuu

SEQ ID NO: 94627 - RNA, 22 nt, Artificial Sequence
  LRRK2 RNA guide
caggacuauugcuuguugauuu

SEQ ID NO: 94628 - RNA, 22 nt, Artificial Sequence
  LRRK2 RNA guide
gaaaaaucaacaagcaauaguc

SEQ ID NO: 94629 - RNA, 22 nt, Artificial Sequence
  LRRK2 RNA guide
gacaggacuauugcuuguugau

SEQ ID NO: 94630 - RNA, 22 nt, Artificial Sequence
  LRRK2 RNA guide
gacuauugcuuguugauuuuuc

SEQ ID NO: 94631 - RNA, 22 nt, Artificial Sequence
  LRRK2 RNA guide
gcagauuucuagaaaaaucaac

SEQ ID NO: 94632 - RNA, 22 nt, Artificial Sequence
  LRRK2 RNA guide
ggacuauugcuuguugauuuuu

SEQ ID NO: 94633 - RNA, 22 nt, Artificial Sequence
  LRRK2 RNA guide
gugcagauuucuagaaaaauca

SEQ ID NO: 94634 - RNA, 22 nt, Artificial Sequence
  LRRK2 RNA guide
guugauuuuucuagaaaucugc

SEQ ID NO: 94635 - RNA, 22 nt, Artificial Sequence
  LRRK2 RNA guide
uaagacaggacuauugcuuguu

SEQ ID NO: 94636 - RNA, 22 nt, Artificial Sequence
  LRRK2 RNA guide
ucaacaagcaauaguccugucu

SEQ ID NO: 94637 - RNA, 20 nt, Artificial Sequence
  LRRK2 RNA guide
aaauucaggguauccacauu

SEQ ID NO: 94638 - RNA, 20 nt, Artificial Sequence
  LRRK2 RNA guide
aauucaggguauccacauuc

SEQ ID NO: 94639 - RNA, 20 nt, Artificial Sequence
  LRRK2 RNA guide
acauagaguugaaaaacaac

SEQ ID NO: 94640 - RNA, 20 nt, Artificial Sequence
  LRRK2 RNA guide
agaguuguuuuucaacucua

SEQ ID NO: 94641 - RNA, 20 nt, Artificial Sequence
  LRRK2 RNA guide
aggguauccacauucaaaca

SEQ ID NO: 94642 - RNA, 20 nt, Artificial Sequence
  LRRK2 RNA guide
aguuguuuuucaacucuaug

SEQ ID NO: 94643 - RNA, 20 nt, Artificial Sequence
  LRRK2 RNA guide
auagaguuguuuuucaacuc

SEQ ID NO: 94644 - RNA, 20 nt, Artificial Sequence
  LRRK2 RNA guide
auccacauucaaacauagag

SEQ ID NO: 94645 - RNA, 20 nt, Artificial Sequence
  LRRK2 RNA guide
auguuugaauguggauaccc

SEQ ID NO: 94646 - RNA, 20 nt, Artificial Sequence
  LRRK2 RNA guide
auucaggguauccacauuca

SEQ ID NO: 94647 - RNA, 20 nt, Artificial Sequence
  LRRK2 RNA guide
caaacauagaguugaaaaac

SEQ ID NO: 94648 - RNA, 20 nt, Artificial Sequence
  LRRK2 RNA guide
cacauucaaacauagaguug

SEQ ID NO: 94649 - RNA, 20 nt, Artificial Sequence
  LRRK2 RNA guide
caggguauccacauucaaac

SEQ ID NO: 94650 - RNA, 20 nt, Artificial Sequence
  LRRK2 RNA guide
ccacauucaaacauagaguu

SEQ ID NO: 94651 - RNA, 20 nt, Artificial Sequence
  LRRK2 RNA guide
cuauguuugaauguggauac

SEQ ID NO: 94652 - RNA, 20 nt, Artificial Sequence
  LRRK2 RNA guide
gaguuguuuuucaacucuau

SEQ ID NO: 94653 - RNA, 20 nt, Artificial Sequence
  LRRK2 RNA guide
ggguauccacauucaaacau

SEQ ID NO: 94654 - RNA, 20 nt, Artificial Sequence
  LRRK2 RNA guide
gguauccacauucaaacaua

SEQ ID NO: 94655 - RNA, 20 nt, Artificial Sequence
  LRRK2 RNA guide
guauccacauucaaacauag

SEQ ID NO: 94656 - RNA, 20 nt, Artificial Sequence
  LRRK2 RNA guide
guuguuuuucaacucuaugu

SEQ ID NO: 94657 - RNA, 20 nt, Artificial Sequence
  LRRK2 RNA guide
guuuuucaacucuauguuug

SEQ ID NO: 94658 - RNA, 20 nt, Artificial Sequence
  LRRK2 RNA guide
uagaguuguuuuucaacucu

SEQ ID NO: 94659 - RNA, 20 nt, Artificial Sequence
  LRRK2 RNA guide
uauguuugaauguggauacc

SEQ ID NO: 94660 - RNA, 20 nt, Artificial Sequence
  LRRK2 RNA guide
ucaacucuauguuugaaugu

SEQ ID NO: 94661 - RNA, 20 nt, Artificial Sequence
  LRRK2 RNA guide
uccacauucaaacauagagu

SEQ ID NO: 94662 - RNA, 20 nt, Artificial Sequence
  LRRK2 RNA guide
uguuugaauguggauacccu

SEQ ID NO: 94663 - RNA, 20 nt, Artificial Sequence
  LRRK2 RNA guide
uucaacucuauguuugaaug

SEQ ID NO: 94664 - RNA, 20 nt, Artificial Sequence
  LRRK2 RNA guide
uucaggguauccacauucaa

SEQ ID NO: 94665 - RNA, 21 nt, Artificial Sequence
  LRRK2 RNA guide
aaaauucaggguauccacauu

SEQ ID NO: 94666 - RNA, 21 nt, Artificial Sequence
  LRRK2 RNA guide
aaauucaggguauccacauuc

SEQ ID NO: 94667 - RNA, 21 nt, Artificial Sequence
  LRRK2 RNA guide
aauucaggguauccacauuca

SEQ ID NO: 94668 - RNA, 21 nt, Artificial Sequence
  LRRK2 RNA guide
aggguauccacauucaaacau

SEQ ID NO: 94669 - RNA, 21 nt, Artificial Sequence
  LRRK2 RNA guide
auccacauucaaacauagagu

SEQ ID NO: 94670 - RNA, 21 nt, Artificial Sequence
  LRRK2 RNA guide
auguuugaauguggauacccu

SEQ ID NO: 94671 - RNA, 21 nt, Artificial Sequence
  LRRK2 RNA guide
auucaggguauccacauucaa

SEQ ID NO: 94672 - RNA, 21 nt, Artificial Sequence
  LRRK2 RNA guide
caggguauccacauucaaaca

SEQ ID NO: 94673 - RNA, 21 nt, Artificial Sequence
  LRRK2 RNA guide
ccacauucaaacauagaguug

SEQ ID NO: 94674 - RNA, 21 nt, Artificial Sequence
  LRRK2 RNA guide
cuauguuugaauguggauacc

SEQ ID NO: 94675 - RNA, 21 nt, Artificial Sequence
  LRRK2 RNA guide
gaguuguuuuucaacucuaug

SEQ ID NO: 94676 - RNA, 21 nt, Artificial Sequence
  LRRK2 RNA guide
ggguauccacauucaaacaua

SEQ ID NO: 94677 - RNA, 21 nt, Artificial Sequence
  LRRK2 RNA guide
gguauccacauucaaacauag

SEQ ID NO: 94678 - RNA, 21 nt, Artificial Sequence
  LRRK2 RNA guide
guauccacauucaaacauaga

SEQ ID NO: 94679 - RNA, 21 nt, Artificial Sequence
  LRRK2 RNA guide
uauccacauucaaacauagag

SEQ ID NO: 94680 - RNA, 21 nt, Artificial Sequence
  LRRK2 RNA guide
uauguuugaauguggauaccc

SEQ ID NO: 94681 - RNA, 21 nt, Artificial Sequence
  LRRK2 RNA guide
ucaggguauccacauucaaac

SEQ ID NO: 94682 - RNA, 21 nt, Artificial Sequence
  LRRK2 RNA guide
uccacauucaaacauagaguu

SEQ ID NO: 94683 - RNA, 21 nt, Artificial Sequence
  LRRK2 RNA guide
ucuauguuugaauguggauac

SEQ ID NO: 94684 - RNA, 21 nt, Artificial Sequence
  LRRK2 RNA guide
uguuugaauguggauacccug

SEQ ID NO: 94685 - RNA, 21 nt, Artificial Sequence
  LRRK2 RNA guide
uucaggguauccacauucaaa

SEQ ID NO: 94686 - RNA, 22 nt, Artificial Sequence
  LRRK2 RNA guide
aaaauucaggguauccacauuc

SEQ ID NO: 94687 - RNA, 22 nt, Artificial Sequence
  LRRK2 RNA guide
aaauucaggguauccacauuca

SEQ ID NO: 94688 - RNA, 22 nt, Artificial Sequence
  LRRK2 RNA guide
aauucaggguauccacauucaa

SEQ ID NO: 94689 - RNA, 22 nt, Artificial Sequence
  LRRK2 RNA guide
acauagaguugaaaaacaacuc

SEQ ID NO: 94690 - RNA, 22 nt, Artificial Sequence
  LRRK2 RNA guide
agaguuguuuuucaacucuaug

SEQ ID NO: 94691 - RNA, 22 nt, Artificial Sequence
  LRRK2 RNA guide
aggguauccacauucaaacaua

SEQ ID NO: 94692 - RNA, 22 nt, Artificial Sequence
  LRRK2 RNA guide
auccacauucaaacauagaguu

SEQ ID NO: 94693 - RNA, 22 nt, Artificial Sequence
  LRRK2 RNA guide
auguuugaauguggauacccug

SEQ ID NO: 94694 - RNA, 22 nt, Artificial Sequence
  LRRK2 RNA guide
auucaggguauccacauucaaa

SEQ ID NO: 94695 - RNA, 22 nt, Artificial Sequence
  LRRK2 RNA guide
caaaauucaggguauccacauu

SEQ ID NO: 94696 - RNA, 22 nt, Artificial Sequence
  LRRK2 RNA guide
caggguauccacauucaaacau

SEQ ID NO: 94697 - RNA, 22 nt, Artificial Sequence
  LRRK2 RNA guide
cuauguuugaauguggauaccc

SEQ ID NO: 94698 - RNA, 22 nt, Artificial Sequence
  LRRK2 RNA guide
cucuauguuugaauguggauac

SEQ ID NO: 94699 - RNA, 22 nt, Artificial Sequence
  LRRK2 RNA guide
gaguuguuuuucaacucuaugu

SEQ ID NO: 94700 - RNA, 22 nt, Artificial Sequence
  LRRK2 RNA guide
ggguauccacauucaaacauag

SEQ ID NO: 94701 - RNA, 22 nt, Artificial Sequence
  LRRK2 RNA guide
gguauccacauucaaacauaga

SEQ ID NO: 94702 - RNA, 22 nt, Artificial Sequence
  LRRK2 RNA guide
guauccacauucaaacauagag

SEQ ID NO: 94703 - RNA, 22 nt, Artificial Sequence
  LRRK2 RNA guide
uauccacauucaaacauagagu

SEQ ID NO: 94704 - RNA, 22 nt, Artificial Sequence
  LRRK2 RNA guide
uauguuugaauguggauacccu

SEQ ID NO: 94705 - RNA, 22 nt, Artificial Sequence
  LRRK2 RNA guide
ucaggguauccacauucaaaca

SEQ ID NO: 94706 - RNA, 22 nt, Artificial Sequence
  LRRK2 RNA guide
uccacauucaaacauagaguug

SEQ ID NO: 94707 - RNA, 22 nt, Artificial Sequence
  LRRK2 RNA guide
ucuauguuugaauguggauacc

SEQ ID NO: 94708 - RNA, 22 nt, Artificial Sequence
  LRRK2 RNA guide
uguuugaauguggauacccuga

SEQ ID NO: 94709 - RNA, 22 nt, Artificial Sequence
  LRRK2 RNA guide
uucaggguauccacauucaaac

SEQ ID NO: 94710 - RNA, 20 nt, Artificial Sequence
  LRRK2 RNA guide
aacucuaucuuugaaugugg

SEQ ID NO: 94711 - RNA, 20 nt, Artificial Sequence
  LRRK2 RNA guide
acauucaaagauagaguuga

SEQ ID NO: 94712 - RNA, 20 nt, Artificial Sequence
  LRRK2 RNA guide
acucuaucuuugaaugugga

SEQ ID NO: 94713 - RNA, 20 nt, Artificial Sequence
  LRRK2 RNA guide
agauagaguugaaaaacaac

SEQ ID NO: 94714 - RNA, 20 nt, Artificial Sequence
  LRRK2 RNA guide
aggguauccacauucaaaga

SEQ ID NO: 94715 - RNA, 20 nt, Artificial Sequence
  LRRK2 RNA guide
aguuguuuuucaacucuauc

SEQ ID NO: 94716 - RNA, 20 nt, Artificial Sequence
  LRRK2 RNA guide
auccacauucaaagauagag

SEQ ID NO: 94717 - RNA, 20 nt, Artificial Sequence
  LRRK2 RNA guide
aucuuugaauguggauaccc

SEQ ID NO: 94718 - RNA, 20 nt, Artificial Sequence
  LRRK2 RNA guide
caaagauagaguugaaaaac

SEQ ID NO: 94719 - RNA, 20 nt, Artificial Sequence
  LRRK2 RNA guide
caacucuaucuuugaaugug

SEQ ID NO: 94720 - RNA, 20 nt, Artificial Sequence
  LRRK2 RNA guide
cacauucaaagauagaguug

SEQ ID NO: 94721 - RNA, 20 nt, Artificial Sequence
  LRRK2 RNA guide
caggguauccacauucaaag

SEQ ID NO: 94722 - RNA, 20 nt, Artificial Sequence
  LRRK2 RNA guide
cauucaaagauagaguugaa

SEQ ID NO: 94723 - RNA, 20 nt, Artificial Sequence
  LRRK2 RNA guide
ccacauucaaagauagaguu

SEQ ID NO: 94724 - RNA, 20 nt, Artificial Sequence
  LRRK2 RNA guide
cuaucuuugaauguggauac

SEQ ID NO: 94725 - RNA, 20 nt, Artificial Sequence
  LRRK2 RNA guide
cucuaucuuugaauguggau

SEQ ID NO: 94726 - RNA, 20 nt, Artificial Sequence
  LRRK2 RNA guide
ggguauccacauucaaagau

SEQ ID NO: 94727 - RNA, 20 nt, Artificial Sequence
  LRRK2 RNA guide
gguauccacauucaaagaua

SEQ ID NO: 94728 - RNA, 20 nt, Artificial Sequence
  LRRK2 RNA guide
guauccacauucaaagauag

SEQ ID NO: 94729 - RNA, 20 nt, Artificial Sequence
  LRRK2 RNA guide
guuguuuuucaacucuaucu

SEQ ID NO: 94730 - RNA, 20 nt, Artificial Sequence
  LRRK2 RNA guide
guuuuucaacucuaucuuug

SEQ ID NO: 94731 - RNA, 20 nt, Artificial Sequence
  LRRK2 RNA guide
uauccacauucaaagauaga

SEQ ID NO: 94732 - RNA, 20 nt, Artificial Sequence
  LRRK2 RNA guide
uaucuuugaauguggauacc

SEQ ID NO: 94733 - RNA, 20 nt, Artificial Sequence
  LRRK2 RNA guide
ucaacucuaucuuugaaugu

SEQ ID NO: 94734 - RNA, 20 nt, Artificial Sequence
  LRRK2 RNA guide
uccacauucaaagauagagu

SEQ ID NO: 94735 - RNA, 20 nt, Artificial Sequence
  LRRK2 RNA guide
ucuaucuuugaauguggaua

SEQ ID NO: 94736 - RNA, 20 nt, Artificial Sequence
  LRRK2 RNA guide
ucuuugaauguggauacccu

SEQ ID NO: 94737 - RNA, 20 nt, Artificial Sequence
  LRRK2 RNA guide
uucaacucuaucuuugaaug

SEQ ID NO: 94738 - RNA, 21 nt, Artificial Sequence
  LRRK2 RNA guide
aacucuaucuuugaaugugga

SEQ ID NO: 94739 - RNA, 21 nt, Artificial Sequence
  LRRK2 RNA guide
acucuaucuuugaauguggau

SEQ ID NO: 94740 - RNA, 21 nt, Artificial Sequence
  LRRK2 RNA guide
aggguauccacauucaaagau

SEQ ID NO: 94741 - RNA, 21 nt, Artificial Sequence
  LRRK2 RNA guide
auccacauucaaagauagagu

SEQ ID NO: 94742 - RNA, 21 nt, Artificial Sequence
  LRRK2 RNA guide
aucuuugaauguggauacccu

SEQ ID NO: 94743 - RNA, 21 nt, Artificial Sequence
  LRRK2 RNA guide
caacucuaucuuugaaugugg

SEQ ID NO: 94744 - RNA, 21 nt, Artificial Sequence
  LRRK2 RNA guide
cacauucaaagauagaguuga

SEQ ID NO: 94745 - RNA, 21 nt, Artificial Sequence
  LRRK2 RNA guide
caggguauccacauucaaaga

SEQ ID NO: 94746 - RNA, 21 nt, Artificial Sequence
  LRRK2 RNA guide
ccacauucaaagauagaguug

SEQ ID NO: 94747 - RNA, 21 nt, Artificial Sequence
  LRRK2 RNA guide
cuaucuuugaauguggauacc

SEQ ID NO: 94748 - RNA, 21 nt, Artificial Sequence
  LRRK2 RNA guide
cucuaucuuugaauguggaua

SEQ ID NO: 94749 - RNA, 21 nt, Artificial Sequence
  LRRK2 RNA guide
gaguuguuuuucaacucuauc

SEQ ID NO: 94750 - RNA, 21 nt, Artificial Sequence
  LRRK2 RNA guide
ggguauccacauucaaagaua

SEQ ID NO: 94751 - RNA, 21 nt, Artificial Sequence
  LRRK2 RNA guide
gguauccacauucaaagauag

SEQ ID NO: 94752 - RNA, 21 nt, Artificial Sequence
  LRRK2 RNA guide
guauccacauucaaagauaga

SEQ ID NO: 94753 - RNA, 21 nt, Artificial Sequence
  LRRK2 RNA guide
uauccacauucaaagauagag

SEQ ID NO: 94754 - RNA, 21 nt, Artificial Sequence
  LRRK2 RNA guide
uaucuuugaauguggauaccc

SEQ ID NO: 94755 - RNA, 21 nt, Artificial Sequence
  LRRK2 RNA guide
ucaacucuaucuuugaaugug

SEQ ID NO: 94756 - RNA, 21 nt, Artificial Sequence
  LRRK2 RNA guide
ucaggguauccacauucaaag

SEQ ID NO: 94757 - RNA, 21 nt, Artificial Sequence
  LRRK2 RNA guide
uccacauucaaagauagaguu

SEQ ID NO: 94758 - RNA, 21 nt, Artificial Sequence
  LRRK2 RNA guide
ucuaucuuugaauguggauac

SEQ ID NO: 94759 - RNA, 21 nt, Artificial Sequence
  LRRK2 RNA guide
ucuuugaauguggauacccug

SEQ ID NO: 94760 - RNA, 22 nt, Artificial Sequence
  LRRK2 RNA guide
aacucuaucuuugaauguggau

SEQ ID NO: 94761 - RNA, 22 nt, Artificial Sequence
  LRRK2 RNA guide
acucuaucuuugaauguggaua

SEQ ID NO: 94762 - RNA, 22 nt, Artificial Sequence
  LRRK2 RNA guide
agaguuguuuuucaacucuauc

SEQ ID NO: 94763 - RNA, 22 nt, Artificial Sequence
  LRRK2 RNA guide
agauagaguugaaaaacaacuc

SEQ ID NO: 94764 - RNA, 22 nt, Artificial Sequence
  LRRK2 RNA guide
aggguauccacauucaaagaua

SEQ ID NO: 94765 - RNA, 22 nt, Artificial Sequence
  LRRK2 RNA guide
auccacauucaaagauagaguu

SEQ ID NO: 94766 - RNA, 22 nt, Artificial Sequence
  LRRK2 RNA guide
aucuuugaauguggauacccug

SEQ ID NO: 94767 - RNA, 22 nt, Artificial Sequence
  LRRK2 RNA guide
caacucuaucuuugaaugugga

SEQ ID NO: 94768 - RNA, 22 nt, Artificial Sequence
  LRRK2 RNA guide
cacauucaaagauagaguugaa

SEQ ID NO: 94769 - RNA, 22 nt, Artificial Sequence
  LRRK2 RNA guide
caggguauccacauucaaagau

SEQ ID NO: 94770 - RNA, 22 nt, Artificial Sequence
  LRRK2 RNA guide
ccacauucaaagauagaguuga

SEQ ID NO: 94771 - RNA, 22 nt, Artificial Sequence
  LRRK2 RNA guide
cuaucuuugaauguggauaccc

SEQ ID NO: 94772 - RNA, 22 nt, Artificial Sequence
  LRRK2 RNA guide
cucuaucuuugaauguggauac

SEQ ID NO: 94773 - RNA, 22 nt, Artificial Sequence
  LRRK2 RNA guide
gaguuguuuuucaacucuaucu

SEQ ID NO: 94774 - RNA, 22 nt, Artificial Sequence
  LRRK2 RNA guide
ggguauccacauucaaagauag

SEQ ID NO: 94775 - RNA, 22 nt, Artificial Sequence
  LRRK2 RNA guide
gguauccacauucaaagauaga

SEQ ID NO: 94776 - RNA, 22 nt, Artificial Sequence
  LRRK2 RNA guide
guauccacauucaaagauagag

SEQ ID NO: 94777 - RNA, 22 nt, Artificial Sequence
  LRRK2 RNA guide
uauccacauucaaagauagagu

SEQ ID NO: 94778 - RNA, 22 nt, Artificial Sequence
  LRRK2 RNA guide
uaucuuugaauguggauacccu

SEQ ID NO: 94779 - RNA, 22 nt, Artificial Sequence
  LRRK2 RNA guide
ucaacucuaucuuugaaugugg

SEQ ID NO: 94780 - RNA, 22 nt, Artificial Sequence
  LRRK2 RNA guide
ucaggguauccacauucaaaga

SEQ ID NO: 94781 - RNA, 22 nt, Artificial Sequence
  LRRK2 RNA guide
uccacauucaaagauagaguug

SEQ ID NO: 94782 - RNA, 22 nt, Artificial Sequence
  LRRK2 RNA guide
ucuaucuuugaauguggauacc

SEQ ID NO: 94783 - RNA, 22 nt, Artificial Sequence
  LRRK2 RNA guide
ucuuugaauguggauacccuga

SEQ ID NO: 94784 - RNA, 22 nt, Artificial Sequence
  LRRK2 RNA guide
uucaacucuaucuuugaaugug

SEQ ID NO: 94785 - RNA, 22 nt, Artificial Sequence
  LRRK2 RNA guide
uucaggguauccacauucaaag

SEQ ID NO: 94786 - RNA, 20 nt, Artificial Sequence
  LRRK2 RNA guide
aagguuucuaucugaaugau

SEQ ID NO: 94787 - RNA, 20 nt, Artificial Sequence
  LRRK2 RNA guide
acaucauucagauagaaacc

SEQ ID NO: 94788 - RNA, 20 nt, Artificial Sequence
  LRRK2 RNA guide
agguuucuaucugaaugaug

SEQ ID NO: 94789 - RNA, 20 nt, Artificial Sequence
  LRRK2 RNA guide
aucauucagauagaaaccuu

SEQ ID NO: 94790 - RNA, 20 nt, Artificial Sequence
  LRRK2 RNA guide
auccuacaucauucagauag

SEQ ID NO: 94791 - RNA, 20 nt, Artificial Sequence
  LRRK2 RNA guide
caucauucagauagaaaccu

SEQ ID NO: 94792 - RNA, 20 nt, Artificial Sequence
  LRRK2 RNA guide
cauucagauagaaaccuuuu

SEQ ID NO: 94793 - RNA, 20 nt, Artificial Sequence
  LRRK2 RNA guide
ccuacaucauucagauagaa

SEQ ID NO: 94794 - RNA, 20 nt, Artificial Sequence
  LRRK2 RNA guide
cuacaucauucagauagaaa

SEQ ID NO: 94795 - RNA, 20 nt, Artificial Sequence
  LRRK2 RNA guide
uacaucauucagauagaaac

SEQ ID NO: 94796 - RNA, 20 nt, Artificial Sequence
  LRRK2 RNA guide
ucauucagauagaaaccuuu

SEQ ID NO: 94797 - RNA, 20 nt, Artificial Sequence
  LRRK2 RNA guide
uccuacaucauucagauaga

SEQ ID NO: 94798 - RNA, 21 nt, Artificial Sequence
  LRRK2 RNA guide
aagguuucuaucugaaugaug

SEQ ID NO: 94799 - RNA, 21 nt, Artificial Sequence
  LRRK2 RNA guide
acaucauucagauagaaaccu

SEQ ID NO: 94800 - RNA, 21 nt, Artificial Sequence
  LRRK2 RNA guide
agguuucuaucugaaugaugu

SEQ ID NO: 94801 - RNA, 21 nt, Artificial Sequence
  LRRK2 RNA guide
auccuacaucauucagauaga

SEQ ID NO: 94802 - RNA, 21 nt, Artificial Sequence
  LRRK2 RNA guide
caucauucagauagaaaccuu

SEQ ID NO: 94803 - RNA, 21 nt, Artificial Sequence
  LRRK2 RNA guide
ccuacaucauucagauagaaa

SEQ ID NO: 94804 - RNA, 21 nt, Artificial Sequence
  LRRK2 RNA guide
cuacaucauucagauagaaac

SEQ ID NO: 94805 - RNA, 21 nt, Artificial Sequence
  LRRK2 RNA guide
gauccuacaucauucagauag

SEQ ID NO: 94806 - RNA, 21 nt, Artificial Sequence
  LRRK2 RNA guide
uacaucauucagauagaaacc

SEQ ID NO: 94807 - RNA, 21 nt, Artificial Sequence
  LRRK2 RNA guide
uccuacaucauucagauagaa

SEQ ID NO: 94808 - RNA, 22 nt, Artificial Sequence
  LRRK2 RNA guide
aaagguuucuaucugaaugaug

SEQ ID NO: 94809 - RNA, 22 nt, Artificial Sequence
  LRRK2 RNA guide
aagguuucuaucugaaugaugu

SEQ ID NO: 94810 - RNA, 22 nt, Artificial Sequence
  LRRK2 RNA guide
acaucauucagauagaaaccuu

SEQ ID NO: 94811 - RNA, 22 nt, Artificial Sequence
  LRRK2 RNA guide
agauccuacaucauucagauag

SEQ ID NO: 94812 - RNA, 22 nt, Artificial Sequence
  LRRK2 RNA guide
agguuucuaucugaaugaugua

SEQ ID NO: 94813 - RNA, 22 nt, Artificial Sequence
  LRRK2 RNA guide
auccuacaucauucagauagaa

SEQ ID NO: 94814 - RNA, 22 nt, Artificial Sequence
  LRRK2 RNA guide
caucauucagauagaaaccuuu

SEQ ID NO: 94815 - RNA, 22 nt, Artificial Sequence
  LRRK2 RNA guide
ccuacaucauucagauagaaac

SEQ ID NO: 94816 - RNA, 22 nt, Artificial Sequence
  LRRK2 RNA guide
cuacaucauucagauagaaacc

SEQ ID NO: 94817 - RNA, 22 nt, Artificial Sequence
  LRRK2 RNA guide
gauccuacaucauucagauaga

SEQ ID NO: 94818 - RNA, 22 nt, Artificial Sequence
  LRRK2 RNA guide
uacaucauucagauagaaaccu

SEQ ID NO: 94819 - RNA, 22 nt, Artificial Sequence
  LRRK2 RNA guide
uccuacaucauucagauagaaa

SEQ ID NO: 94820 - RNA, 20 nt, Artificial Sequence
  LRRK2 RNA guide
aagaccaugaggauaaauau

SEQ ID NO: 94821 - RNA, 20 nt, Artificial Sequence
  LRRK2 RNA guide
accaagaccaugaggauaaa

SEQ ID NO: 94822 - RNA, 20 nt, Artificial Sequence
  LRRK2 RNA guide
accaugaggauaaauaucua

SEQ ID NO: 94823 - RNA, 20 nt, Artificial Sequence
  LRRK2 RNA guide
agaccaugaggauaaauauc

SEQ ID NO: 94824 - RNA, 20 nt, Artificial Sequence
  LRRK2 RNA guide
agauauuuauccucaugguc

SEQ ID NO: 94825 - RNA, 20 nt, Artificial Sequence
  LRRK2 RNA guide
agcuccuaccaagaccauga

SEQ ID NO: 94826 - RNA, 20 nt, Artificial Sequence
  LRRK2 RNA guide
auauuuauccucauggucuu

SEQ ID NO: 94827 - RNA, 20 nt, Artificial Sequence
  LRRK2 RNA guide
auuuauccucauggucuugg

SEQ ID NO: 94828 - RNA, 20 nt, Artificial Sequence
  LRRK2 RNA guide
caagaccaugaggauaaaua

SEQ ID NO: 94829 - RNA, 20 nt, Artificial Sequence
  LRRK2 RNA guide
cagcuccuaccaagaccaug

SEQ ID NO: 94830 - RNA, 20 nt, Artificial Sequence
  LRRK2 RNA guide
caugaggauaaauaucuaac

SEQ ID NO: 94831 - RNA, 20 nt, Artificial Sequence
  LRRK2 RNA guide
ccaagaccaugaggauaaau

SEQ ID NO: 94832 - RNA, 20 nt, Artificial Sequence
  LRRK2 RNA guide
ccaugaggauaaauaucuaa

SEQ ID NO: 94833 - RNA, 20 nt, Artificial Sequence
  LRRK2 RNA guide
ccuaccaagaccaugaggau

SEQ ID NO: 94834 - RNA, 20 nt, Artificial Sequence
  LRRK2 RNA guide
cuaccaagaccaugaggaua

SEQ ID NO: 94835 - RNA, 20 nt, Artificial Sequence
  LRRK2 RNA guide
cuccuaccaagaccaugagg

SEQ ID NO: 94836 - RNA, 20 nt, Artificial Sequence
  LRRK2 RNA guide
gaccaugaggauaaauaucu

SEQ ID NO: 94837 - RNA, 20 nt, Artificial Sequence
  LRRK2 RNA guide
gaggauaaauaucuaacacu

SEQ ID NO: 94838 - RNA, 20 nt, Artificial Sequence
  LRRK2 RNA guide
gauauuuauccucauggucu

SEQ ID NO: 94839 - RNA, 20 nt, Artificial Sequence
  LRRK2 RNA guide
gcaacugaaaaguguuagau

SEQ ID NO: 94840 - RNA, 20 nt, Artificial Sequence
  LRRK2 RNA guide
gcuccuaccaagaccaugag

SEQ ID NO: 94841 - RNA, 20 nt, Artificial Sequence
  LRRK2 RNA guide
guuagauauuuauccucaug

SEQ ID NO: 94842 - RNA, 20 nt, Artificial Sequence
  LRRK2 RNA guide
uaccaagaccaugaggauaa

SEQ ID NO: 94843 - RNA, 20 nt, Artificial Sequence
  LRRK2 RNA guide
uagauauuuauccucauggu

SEQ ID NO: 94844 - RNA, 20 nt, Artificial Sequence
  LRRK2 RNA guide
uauccucauggucuugguag

SEQ ID NO: 94845 - RNA, 20 nt, Artificial Sequence
  LRRK2 RNA guide
uauuuauccucauggucuug

SEQ ID NO: 94846 - RNA, 20 nt, Artificial Sequence
  LRRK2 RNA guide
uccuaccaagaccaugagga

SEQ ID NO: 94847 - RNA, 20 nt, Artificial Sequence
  LRRK2 RNA guide
ugaggauaaauaucuaacac

SEQ ID NO: 94848 - RNA, 20 nt, Artificial Sequence
  LRRK2 RNA guide
uuagauauuuauccucaugg

SEQ ID NO: 94849 - RNA, 20 nt, Artificial Sequence
  LRRK2 RNA guide
uuauccucauggucuuggua

SEQ ID NO: 94850 - RNA, 21 nt, Artificial Sequence
  LRRK2 RNA guide
aagaccaugaggauaaauauc

SEQ ID NO: 94851 - RNA, 21 nt, Artificial Sequence
  LRRK2 RNA guide
acagcuccuaccaagaccaug

SEQ ID NO: 94852 - RNA, 21 nt, Artificial Sequence
  LRRK2 RNA guide
accaagaccaugaggauaaau

SEQ ID NO: 94853 - RNA, 21 nt, Artificial Sequence
  LRRK2 RNA guide
agaccaugaggauaaauaucu

SEQ ID NO: 94854 - RNA, 21 nt, Artificial Sequence
  LRRK2 RNA guide
agauauuuauccucauggucu

SEQ ID NO: 94855 - RNA, 21 nt, Artificial Sequence
  LRRK2 RNA guide
agcaacugaaaaguguuagau

SEQ ID NO: 94856 - RNA, 21 nt, Artificial Sequence
  LRRK2 RNA guide
agcuccuaccaagaccaugag

SEQ ID NO: 94857 - RNA, 21 nt, Artificial Sequence
  LRRK2 RNA guide
auauuuauccucauggucuug

SEQ ID NO: 94858 - RNA, 21 nt, Artificial Sequence
  LRRK2 RNA guide
auuuauccucauggucuuggu

SEQ ID NO: 94859 - RNA, 21 nt, Artificial Sequence
  LRRK2 RNA guide
caagaccaugaggauaaauau

SEQ ID NO: 94860 - RNA, 21 nt, Artificial Sequence
  LRRK2 RNA guide
cagcuccuaccaagaccauga

SEQ ID NO: 94861 - RNA, 21 nt, Artificial Sequence
  LRRK2 RNA guide
ccaagaccaugaggauaaaua

SEQ ID NO: 94862 - RNA, 21 nt, Artificial Sequence
  LRRK2 RNA guide
ccaugaggauaaauaucuaac

SEQ ID NO: 94863 - RNA, 21 nt, Artificial Sequence
  LRRK2 RNA guide
ccuaccaagaccaugaggaua

SEQ ID NO: 94864 - RNA, 21 nt, Artificial Sequence
  LRRK2 RNA guide
cuaccaagaccaugaggauaa

SEQ ID NO: 94865 - RNA, 21 nt, Artificial Sequence
  LRRK2 RNA guide
cuccuaccaagaccaugagga

SEQ ID NO: 94866 - RNA, 21 nt, Artificial Sequence
  LRRK2 RNA guide
gaccaugaggauaaauaucua

SEQ ID NO: 94867 - RNA, 21 nt, Artificial Sequence
  LRRK2 RNA guide
gauauuuauccucauggucuu

SEQ ID NO: 94868 - RNA, 21 nt, Artificial Sequence
  LRRK2 RNA guide
gcaacugaaaaguguuagaua

SEQ ID NO: 94869 - RNA, 21 nt, Artificial Sequence
  LRRK2 RNA guide
gcuccuaccaagaccaugagg

SEQ ID NO: 94870 - RNA, 21 nt, Artificial Sequence
  LRRK2 RNA guide
guuagauauuuauccucaugg

SEQ ID NO: 94871 - RNA, 21 nt, Artificial Sequence
  LRRK2 RNA guide
uaccaagaccaugaggauaaa

SEQ ID NO: 94872 - RNA, 21 nt, Artificial Sequence
  LRRK2 RNA guide
uagauauuuauccucaugguc

SEQ ID NO: 94873 - RNA, 21 nt, Artificial Sequence
  LRRK2 RNA guide
uauccucauggucuugguagg

SEQ ID NO: 94874 - RNA, 21 nt, Artificial Sequence
  LRRK2 RNA guide
uauuuauccucauggucuugg

SEQ ID NO: 94875 - RNA, 21 nt, Artificial Sequence
  LRRK2 RNA guide
uccuaccaagaccaugaggau

SEQ ID NO: 94876 - RNA, 21 nt, Artificial Sequence
  LRRK2 RNA guide
uuauccucauggucuugguag

SEQ ID NO: 94877 - RNA, 21 nt, Artificial Sequence
  LRRK2 RNA guide
uuuauccucauggucuuggua

SEQ ID NO: 94878 - RNA, 22 nt, Artificial Sequence
  LRRK2 RNA guide
aagaccaugaggauaaauaucu

SEQ ID NO: 94879 - RNA, 22 nt, Artificial Sequence
  LRRK2 RNA guide
acagcuccuaccaagaccauga

SEQ ID NO: 94880 - RNA, 22 nt, Artificial Sequence
  LRRK2 RNA guide
accaagaccaugaggauaaaua

SEQ ID NO: 94881 - RNA, 22 nt, Artificial Sequence
  LRRK2 RNA guide
accaugaggauaaauaucuaac

SEQ ID NO: 94882 - RNA, 22 nt, Artificial Sequence
  LRRK2 RNA guide
agaccaugaggauaaauaucua

SEQ ID NO: 94883 - RNA, 22 nt, Artificial Sequence
  LRRK2 RNA guide
agauauuuauccucauggucuu

SEQ ID NO: 94884 - RNA, 22 nt, Artificial Sequence
  LRRK2 RNA guide
agcaacugaaaaguguuagaua

SEQ ID NO: 94885 - RNA, 22 nt, Artificial Sequence
  LRRK2 RNA guide
agcuccuaccaagaccaugagg

SEQ ID NO: 94886 - RNA, 22 nt, Artificial Sequence
  LRRK2 RNA guide
auauuuauccucauggucuugg

SEQ ID NO: 94887 - RNA, 22 nt, Artificial Sequence
  LRRK2 RNA guide
auuuauccucauggucuuggua

SEQ ID NO: 94888 - RNA, 22 nt, Artificial Sequence
  LRRK2 RNA guide
caagaccaugaggauaaauauc

SEQ ID NO: 94889 - RNA, 22 nt, Artificial Sequence
  LRRK2 RNA guide
cacagcuccuaccaagaccaug

SEQ ID NO: 94890 - RNA, 22 nt, Artificial Sequence
  LRRK2 RNA guide
cagcaacugaaaaguguuagau

SEQ ID NO: 94891 - RNA, 22 nt, Artificial Sequence
  LRRK2 RNA guide
cagcuccuaccaagaccaugag

SEQ ID NO: 94892 - RNA, 22 nt, Artificial Sequence
  LRRK2 RNA guide
caugaggauaaauaucuaacac

SEQ ID NO: 94893 - RNA, 22 nt, Artificial Sequence
  LRRK2 RNA guide
ccaagaccaugaggauaaauau

SEQ ID NO: 94894 - RNA, 22 nt, Artificial Sequence
  LRRK2 RNA guide
ccaugaggauaaauaucuaaca

SEQ ID NO: 94895 - RNA, 22 nt, Artificial Sequence
  LRRK2 RNA guide
ccuaccaagaccaugaggauaa

SEQ ID NO: 94896 - RNA, 22 nt, Artificial Sequence
  LRRK2 RNA guide
cuaccaagaccaugaggauaaa

SEQ ID NO: 94897 - RNA, 22 nt, Artificial Sequence
  LRRK2 RNA guide
cuccuaccaagaccaugaggau

SEQ ID NO: 94898 - RNA, 22 nt, Artificial Sequence
  LRRK2 RNA guide
gaccaugaggauaaauaucuaa

SEQ ID NO: 94899 - RNA, 22 nt, Artificial Sequence
  LRRK2 RNA guide
gauauuuauccucauggucuug

SEQ ID NO: 94900 - RNA, 22 nt, Artificial Sequence
  LRRK2 RNA guide
gcuccuaccaagaccaugagga

SEQ ID NO: 94901 - RNA, 22 nt, Artificial Sequence
  LRRK2 RNA guide
guguuagauauuuauccucaug

SEQ ID NO: 94902 - RNA, 22 nt, Artificial Sequence
  LRRK2 RNA guide
guuagauauuuauccucauggu

SEQ ID NO: 94903 - RNA, 22 nt, Artificial Sequence
  LRRK2 RNA guide
uaccaagaccaugaggauaaau

SEQ ID NO: 94904 - RNA, 22 nt, Artificial Sequence
  LRRK2 RNA guide
uagauauuuauccucauggucu

SEQ ID NO: 94905 - RNA, 22 nt, Artificial Sequence
  LRRK2 RNA guide
uauccucauggucuugguagga

SEQ ID NO: 94906 - RNA, 22 nt, Artificial Sequence
  LRRK2 RNA guide
uauuuauccucauggucuuggu

SEQ ID NO: 94907 - RNA, 22 nt, Artificial Sequence
  LRRK2 RNA guide
uccuaccaagaccaugaggaua

SEQ ID NO: 94908 - RNA, 22 nt, Artificial Sequence
  LRRK2 RNA guide
uguuagauauuuauccucaugg

SEQ ID NO: 94909 - RNA, 22 nt, Artificial Sequence
  LRRK2 RNA guide
uuagauauuuauccucaugguc

SEQ ID NO: 94910 - RNA, 22 nt, Artificial Sequence
  LRRK2 RNA guide
uuauccucauggucuugguagg

SEQ ID NO: 94911 - RNA, 22 nt, Artificial Sequence
  LRRK2 RNA guide
uuuauccucauggucuugguag

SEQ ID NO: 94912 - RNA, 20 nt, Artificial Sequence
  LRRK2 RNA guide
aaaguguuagauauuugucc

SEQ ID NO: 94913 - RNA, 20 nt, Artificial Sequence
  LRRK2 RNA guide
aagaccaugaggacaaauau

SEQ ID NO: 94914 - RNA, 20 nt, Artificial Sequence
  LRRK2 RNA guide
aaguguuagauauuuguccu

SEQ ID NO: 94915 - RNA, 20 nt, Artificial Sequence
  LRRK2 RNA guide
accaagaccaugaggacaaa

SEQ ID NO: 94916 - RNA, 20 nt, Artificial Sequence
  LRRK2 RNA guide
accaugaggacaaauaucua

SEQ ID NO: 94917 - RNA, 20 nt, Artificial Sequence
  LRRK2 RNA guide
agaccaugaggacaaauauc

SEQ ID NO: 94918 - RNA, 20 nt, Artificial Sequence
  LRRK2 RNA guide
agauauuuguccucaugguc

SEQ ID NO: 94919 - RNA, 20 nt, Artificial Sequence
  LRRK2 RNA guide
aggacaaauaucuaacacuu

SEQ ID NO: 94920 - RNA, 20 nt, Artificial Sequence
  LRRK2 RNA guide
aguguuagauauuuguccuc

SEQ ID NO: 94921 - RNA, 20 nt, Artificial Sequence
  LRRK2 RNA guide
auauuuguccucauggucuu

SEQ ID NO: 94922 - RNA, 20 nt, Artificial Sequence
  LRRK2 RNA guide
augaggacaaauaucuaaca

SEQ ID NO: 94923 - RNA, 20 nt, Artificial Sequence
  LRRK2 RNA guide
auuuguccucauggucuugg

SEQ ID NO: 94924 - RNA, 20 nt, Artificial Sequence
  LRRK2 RNA guide
caagaccaugaggacaaaua

SEQ ID NO: 94925 - RNA, 20 nt, Artificial Sequence
  LRRK2 RNA guide
caugaggacaaauaucuaac

SEQ ID NO: 94926 - RNA, 20 nt, Artificial Sequence
  LRRK2 RNA guide
ccaagaccaugaggacaaau

SEQ ID NO: 94927 - RNA, 20 nt, Artificial Sequence
  LRRK2 RNA guide
ccaugaggacaaauaucuaa

SEQ ID NO: 94928 - RNA, 20 nt, Artificial Sequence
  LRRK2 RNA guide
ccuaccaagaccaugaggac

SEQ ID NO: 94929 - RNA, 20 nt, Artificial Sequence
  LRRK2 RNA guide
cuaccaagaccaugaggaca

SEQ ID NO: 94930 - RNA, 20 nt, Artificial Sequence
  LRRK2 RNA guide
gaccaugaggacaaauaucu

SEQ ID NO: 94931 - RNA, 20 nt, Artificial Sequence
  LRRK2 RNA guide
gaggacaaauaucuaacacu

SEQ ID NO: 94932 - RNA, 20 nt, Artificial Sequence
  LRRK2 RNA guide
gauauuuguccucauggucu

SEQ ID NO: 94933 - RNA, 20 nt, Artificial Sequence
  LRRK2 RNA guide
ggacaaauaucuaacacuuu

SEQ ID NO: 94934 - RNA, 20 nt, Artificial Sequence
  LRRK2 RNA guide
guguuagauauuuguccuca

SEQ ID NO: 94935 - RNA, 20 nt, Artificial Sequence
  LRRK2 RNA guide
guuagauauuuguccucaug

SEQ ID NO: 94936 - RNA, 20 nt, Artificial Sequence
  LRRK2 RNA guide
uaccaagaccaugaggacaa

SEQ ID NO: 94937 - RNA, 20 nt, Artificial Sequence
  LRRK2 RNA guide
uagauauuuguccucauggu

SEQ ID NO: 94938 - RNA, 20 nt, Artificial Sequence
  LRRK2 RNA guide
uauuuguccucauggucuug

SEQ ID NO: 94939 - RNA, 20 nt, Artificial Sequence
  LRRK2 RNA guide
ugaggacaaauaucuaacac

SEQ ID NO: 94940 - RNA, 20 nt, Artificial Sequence
  LRRK2 RNA guide
uguccucauggucuugguag

SEQ ID NO: 94941 - RNA, 20 nt, Artificial Sequence
  LRRK2 RNA guide
uguuagauauuuguccucau

SEQ ID NO: 94942 - RNA, 20 nt, Artificial Sequence
  LRRK2 RNA guide
uuagauauuuguccucaugg

SEQ ID NO: 94943 - RNA, 20 nt, Artificial Sequence
  LRRK2 RNA guide
uuguccucauggucuuggua

SEQ ID NO: 94944 - RNA, 20 nt, Artificial Sequence
  LRRK2 RNA guide
uuuguccucauggucuuggu

SEQ ID NO: 94945 - RNA, 21 nt, Artificial Sequence
  LRRK2 RNA guide
aagaccaugaggacaaauauc

SEQ ID NO: 94946 - RNA, 21 nt, Artificial Sequence
  LRRK2 RNA guide
aaguguuagauauuuguccuc

SEQ ID NO: 94947 - RNA, 21 nt, Artificial Sequence
  LRRK2 RNA guide
accaagaccaugaggacaaau

SEQ ID NO: 94948 - RNA, 21 nt, Artificial Sequence
  LRRK2 RNA guide
accaugaggacaaauaucuaa

SEQ ID NO: 94949 - RNA, 21 nt, Artificial Sequence
  LRRK2 RNA guide
agaccaugaggacaaauaucu

SEQ ID NO: 94950 - RNA, 21 nt, Artificial Sequence
  LRRK2 RNA guide
agauauuuguccucauggucu

SEQ ID NO: 94951 - RNA, 21 nt, Artificial Sequence
  LRRK2 RNA guide
aguguuagauauuuguccuca

SEQ ID NO: 94952 - RNA, 21 nt, Artificial Sequence
  LRRK2 RNA guide
auauuuguccucauggucuug

SEQ ID NO: 94953 - RNA, 21 nt, Artificial Sequence
  LRRK2 RNA guide
augaggacaaauaucuaacac

SEQ ID NO: 94954 - RNA, 21 nt, Artificial Sequence
  LRRK2 RNA guide
auuuguccucauggucuuggu

SEQ ID NO: 94955 - RNA, 21 nt, Artificial Sequence
  LRRK2 RNA guide
caagaccaugaggacaaauau

SEQ ID NO: 94956 - RNA, 21 nt, Artificial Sequence
  LRRK2 RNA guide
caugaggacaaauaucuaaca

SEQ ID NO: 94957 - RNA, 21 nt, Artificial Sequence
  LRRK2 RNA guide
ccaagaccaugaggacaaaua

SEQ ID NO: 94958 - RNA, 21 nt, Artificial Sequence
  LRRK2 RNA guide
ccaugaggacaaauaucuaac

SEQ ID NO: 94959 - RNA, 21 nt, Artificial Sequence
  LRRK2 RNA guide
ccuaccaagaccaugaggaca

SEQ ID NO: 94960 - RNA, 21 nt, Artificial Sequence
  LRRK2 RNA guide
cuaccaagaccaugaggacaa

SEQ ID NO: 94961 - RNA, 21 nt, Artificial Sequence
  LRRK2 RNA guide
gaccaugaggacaaauaucua

SEQ ID NO: 94962 - RNA, 21 nt, Artificial Sequence
  LRRK2 RNA guide
gaggacaaauaucuaacacuu

SEQ ID NO: 94963 - RNA, 21 nt, Artificial Sequence
  LRRK2 RNA guide
gauauuuguccucauggucuu

SEQ ID NO: 94964 - RNA, 21 nt, Artificial Sequence
  LRRK2 RNA guide
guguuagauauuuguccucau

SEQ ID NO: 94965 - RNA, 21 nt, Artificial Sequence
  LRRK2 RNA guide
guuagauauuuguccucaugg

SEQ ID NO: 94966 - RNA, 21 nt, Artificial Sequence
  LRRK2 RNA guide
uaccaagaccaugaggacaaa

SEQ ID NO: 94967 - RNA, 21 nt, Artificial Sequence
  LRRK2 RNA guide
uagauauuuguccucaugguc

SEQ ID NO: 94968 - RNA, 21 nt, Artificial Sequence
  LRRK2 RNA guide
uauuuguccucauggucuugg

SEQ ID NO: 94969 - RNA, 21 nt, Artificial Sequence
  LRRK2 RNA guide
uccuaccaagaccaugaggac

SEQ ID NO: 94970 - RNA, 21 nt, Artificial Sequence
  LRRK2 RNA guide
ugaggacaaauaucuaacacu

SEQ ID NO: 94971 - RNA, 21 nt, Artificial Sequence
  LRRK2 RNA guide
uguccucauggucuugguagg

SEQ ID NO: 94972 - RNA, 21 nt, Artificial Sequence
  LRRK2 RNA guide
uguuagauauuuguccucaug

SEQ ID NO: 94973 - RNA, 21 nt, Artificial Sequence
  LRRK2 RNA guide
uuagauauuuguccucauggu

SEQ ID NO: 94974 - RNA, 21 nt, Artificial Sequence
  LRRK2 RNA guide
uuguccucauggucuugguag

SEQ ID NO: 94975 - RNA, 21 nt, Artificial Sequence
  LRRK2 RNA guide
uuuguccucauggucuuggua

SEQ ID NO: 94976 - RNA, 22 nt, Artificial Sequence
  LRRK2 RNA guide
aaaguguuagauauuuguccuc

SEQ ID NO: 94977 - RNA, 22 nt, Artificial Sequence
  LRRK2 RNA guide
aagaccaugaggacaaauaucu

SEQ ID NO: 94978 - RNA, 22 nt, Artificial Sequence
  LRRK2 RNA guide
aaguguuagauauuuguccuca

SEQ ID NO: 94979 - RNA, 22 nt, Artificial Sequence
  LRRK2 RNA guide
accaagaccaugaggacaaaua

SEQ ID NO: 94980 - RNA, 22 nt, Artificial Sequence
  LRRK2 RNA guide
accaugaggacaaauaucuaac

SEQ ID NO: 94981 - RNA, 22 nt, Artificial Sequence
  LRRK2 RNA guide
agaccaugaggacaaauaucua

SEQ ID NO: 94982 - RNA, 22 nt, Artificial Sequence
  LRRK2 RNA guide
agauauuuguccucauggucuu

SEQ ID NO: 94983 - RNA, 22 nt, Artificial Sequence
  LRRK2 RNA guide
aguguuagauauuuguccucau

SEQ ID NO: 94984 - RNA, 22 nt, Artificial Sequence
  LRRK2 RNA guide
auauuuguccucauggucuugg

SEQ ID NO: 94985 - RNA, 22 nt, Artificial Sequence
  LRRK2 RNA guide
augaggacaaauaucuaacacu

SEQ ID NO: 94986 - RNA, 22 nt, Artificial Sequence
  LRRK2 RNA guide
auuuguccucauggucuuggua

SEQ ID NO: 94987 - RNA, 22 nt, Artificial Sequence
  LRRK2 RNA guide
caagaccaugaggacaaauauc

SEQ ID NO: 94988 - RNA, 22 nt, Artificial Sequence
  LRRK2 RNA guide
caugaggacaaauaucuaacac

SEQ ID NO: 94989 - RNA, 22 nt, Artificial Sequence
  LRRK2 RNA guide
ccaagaccaugaggacaaauau

SEQ ID NO: 94990 - RNA, 22 nt, Artificial Sequence
  LRRK2 RNA guide
ccaugaggacaaauaucuaaca

SEQ ID NO: 94991 - RNA, 22 nt, Artificial Sequence
  LRRK2 RNA guide
ccuaccaagaccaugaggacaa

SEQ ID NO: 94992 - RNA, 22 nt, Artificial Sequence
  LRRK2 RNA guide
cuaccaagaccaugaggacaaa

SEQ ID NO: 94993 - RNA, 22 nt, Artificial Sequence
  LRRK2 RNA guide
cuccuaccaagaccaugaggac

SEQ ID NO: 94994 - RNA, 22 nt, Artificial Sequence
  LRRK2 RNA guide
gaaaaguguuagauauuugucc

SEQ ID NO: 94995 - RNA, 22 nt, Artificial Sequence
  LRRK2 RNA guide
gaccaugaggacaaauaucuaa

SEQ ID NO: 94996 - RNA, 22 nt, Artificial Sequence
  LRRK2 RNA guide
gaggacaaauaucuaacacuuu

SEQ ID NO: 94997 - RNA, 22 nt, Artificial Sequence
  LRRK2 RNA guide
gauauuuguccucauggucuug

SEQ ID NO: 94998 - RNA, 22 nt, Artificial Sequence
  LRRK2 RNA guide
ggacaaauaucuaacacuuuuc

SEQ ID NO: 94999 - RNA, 22 nt, Artificial Sequence
  LRRK2 RNA guide
guguuagauauuuguccucaug

SEQ ID NO: 95000 - RNA, 22 nt, Artificial Sequence
  LRRK2 RNA guide
guuagauauuuguccucauggu

SEQ ID NO: 95001 - RNA, 22 nt, Artificial Sequence
  LRRK2 RNA guide
uaccaagaccaugaggacaaau

SEQ ID NO: 95002 - RNA, 22 nt, Artificial Sequence
  LRRK2 RNA guide
uagauauuuguccucauggucu

SEQ ID NO: 95003 - RNA, 22 nt, Artificial Sequence
  LRRK2 RNA guide
uauuuguccucauggucuuggu

SEQ ID NO: 95004 - RNA, 22 nt, Artificial Sequence
  LRRK2 RNA guide
uccuaccaagaccaugaggaca

SEQ ID NO: 95005 - RNA, 22 nt, Artificial Sequence
  LRRK2 RNA guide
ugaggacaaauaucuaacacuu

SEQ ID NO: 95006 - RNA, 22 nt, Artificial Sequence
  LRRK2 RNA guide
uguccucauggucuugguagga

SEQ ID NO: 95007 - RNA, 22 nt, Artificial Sequence
  LRRK2 RNA guide
uguuagauauuuguccucaugg

SEQ ID NO: 95008 - RNA, 22 nt, Artificial Sequence
  LRRK2 RNA guide
uuagauauuuguccucaugguc

SEQ ID NO: 95009 - RNA, 22 nt, Artificial Sequence
  LRRK2 RNA guide
uuguccucauggucuugguagg

SEQ ID NO: 95010 - RNA, 22 nt, Artificial Sequence
  LRRK2 RNA guide
uuuguccucauggucuugguag

SEQ ID NO: 95011 - RNA, 20 nt, Artificial Sequence
  LRRK2 RNA guide
aacuauuucaacuaaaacgc

SEQ ID NO: 95012 - RNA, 20 nt, Artificial Sequence
  LRRK2 RNA guide
aaguugcguuuuaguugaaa

SEQ ID NO: 95013 - RNA, 20 nt, Artificial Sequence
  LRRK2 RNA guide
aauaaguugcguuuuaguug

SEQ ID NO: 95014 - RNA, 20 nt, Artificial Sequence
  LRRK2 RNA guide
acuauuucaacuaaaacgca

SEQ ID NO: 95015 - RNA, 20 nt, Artificial Sequence
  LRRK2 RNA guide
aguugaaauaguucacacau

SEQ ID NO: 95016 - RNA, 20 nt, Artificial Sequence
  LRRK2 RNA guide
aguugcguuuuaguugaaau

SEQ ID NO: 95017 - RNA, 20 nt, Artificial Sequence
  LRRK2 RNA guide
auaaguugcguuuuaguuga

SEQ ID NO: 95018 - RNA, 20 nt, Artificial Sequence
  LRRK2 RNA guide
aucgauuaugugugaacuau

SEQ ID NO: 95019 - RNA, 20 nt, Artificial Sequence
  LRRK2 RNA guide
augugugaacuauuucaacu

SEQ ID NO: 95020 - RNA, 20 nt, Artificial Sequence
  LRRK2 RNA guide
auuucaacuaaaacgcaacu

SEQ ID NO: 95021 - RNA, 20 nt, Artificial Sequence
  LRRK2 RNA guide
cgauuaugugugaacuauuu

SEQ ID NO: 95022 - RNA, 20 nt, Artificial Sequence
  LRRK2 RNA guide
cguuuuaguugaaauaguuc

SEQ ID NO: 95023 - RNA, 20 nt, Artificial Sequence
  LRRK2 RNA guide
cuaucgauuaugugugaacu

SEQ ID NO: 95024 - RNA, 20 nt, Artificial Sequence
  LRRK2 RNA guide
cuauuucaacuaaaacgcaa

SEQ ID NO: 95025 - RNA, 20 nt, Artificial Sequence
  LRRK2 RNA guide
gaacuauuucaacuaaaacg

SEQ ID NO: 95026 - RNA, 20 nt, Artificial Sequence
  LRRK2 RNA guide
gauuaugugugaacuauuuc

SEQ ID NO: 95027 - RNA, 20 nt, Artificial Sequence
  LRRK2 RNA guide
gcguuuuaguugaaauaguu

SEQ ID NO: 95028 - RNA, 20 nt, Artificial Sequence
  LRRK2 RNA guide
gugugaacuauuucaacuaa

SEQ ID NO: 95029 - RNA, 20 nt, Artificial Sequence
  LRRK2 RNA guide
guugaaauaguucacacaua

SEQ ID NO: 95030 - RNA, 20 nt, Artificial Sequence
  LRRK2 RNA guide
guugcguuuuaguugaaaua

SEQ ID NO: 95031 - RNA, 20 nt, Artificial Sequence
  LRRK2 RNA guide
uaaguugcguuuuaguugaa

SEQ ID NO: 95032 - RNA, 20 nt, Artificial Sequence
  LRRK2 RNA guide
uaguugaaauaguucacaca

SEQ ID NO: 95033 - RNA, 20 nt, Artificial Sequence
  LRRK2 RNA guide
uaucgauuaugugugaacua

SEQ ID NO: 95034 - RNA, 20 nt, Artificial Sequence
  LRRK2 RNA guide
uaugugugaacuauuucaac

SEQ ID NO: 95035 - RNA, 20 nt, Artificial Sequence
  LRRK2 RNA guide
uauuucaacuaaaacgcaac

SEQ ID NO: 95036 - RNA, 20 nt, Artificial Sequence
  LRRK2 RNA guide
ucaacuaaaacgcaacuuau

SEQ ID NO: 95037 - RNA, 20 nt, Artificial Sequence
  LRRK2 RNA guide
ucgauuaugugugaacuauu

SEQ ID NO: 95038 - RNA, 20 nt, Artificial Sequence
  LRRK2 RNA guide
ugcguuuuaguugaaauagu

SEQ ID NO: 95039 - RNA, 20 nt, Artificial Sequence
  LRRK2 RNA guide
ugugugaacuauuucaacua

SEQ ID NO: 95040 - RNA, 20 nt, Artificial Sequence
  LRRK2 RNA guide
uuaguugaaauaguucacac

SEQ ID NO: 95041 - RNA, 20 nt, Artificial Sequence
  LRRK2 RNA guide
uucaacuaaaacgcaacuua

SEQ ID NO: 95042 - RNA, 20 nt, Artificial Sequence
  LRRK2 RNA guide
uugcguuuuaguugaaauag

SEQ ID NO: 95043 - RNA, 20 nt, Artificial Sequence
  LRRK2 RNA guide
uuucaacuaaaacgcaacuu

SEQ ID NO: 95044 - RNA, 21 nt, Artificial Sequence
  LRRK2 RNA guide
cgauuaugugugaacuauuuc

SEQ ID NO: 95045 - RNA, 21 nt, Artificial Sequence
  LRRK2 RNA guide
cuaucgauuaugugugaacua

SEQ ID NO: 95046 - RNA, 21 nt, Artificial Sequence
  LRRK2 RNA guide
cuauuucaacuaaaacgcaac

SEQ ID NO: 95047 - RNA, 21 nt, Artificial Sequence
  LRRK2 RNA guide
gaacuauuucaacuaaaacgc

SEQ ID NO: 95048 - RNA, 21 nt, Artificial Sequence
  LRRK2 RNA guide
gcguuuuaguugaaauaguuc

SEQ ID NO: 95049 - RNA, 21 nt, Artificial Sequence
  LRRK2 RNA guide
guugcguuuuaguugaaauag

SEQ ID NO: 95050 - RNA, 21 nt, Artificial Sequence
  LRRK2 RNA guide
ucuaucgauuaugugugaacu

SEQ ID NO: 95051 - RNA, 22 nt, Artificial Sequence
  LRRK2 RNA guide
acuauuucaacuaaaacgcaac

SEQ ID NO: 95052 - RNA, 22 nt, Artificial Sequence
  LRRK2 RNA guide
aguugcguuuuaguugaaauag

SEQ ID NO: 95053 - RNA, 22 nt, Artificial Sequence
  LRRK2 RNA guide
cgauuaugugugaacuauuuca

SEQ ID NO: 95054 - RNA, 22 nt, Artificial Sequence
  LRRK2 RNA guide
cguuuuaguugaaauaguucac

SEQ ID NO: 95055 - RNA, 22 nt, Artificial Sequence
  LRRK2 RNA guide
cuaucgauuaugugugaacuau

SEQ ID NO: 95056 - RNA, 22 nt, Artificial Sequence
  LRRK2 RNA guide
cuauuucaacuaaaacgcaacu

SEQ ID NO: 95057 - RNA, 22 nt, Artificial Sequence
  LRRK2 RNA guide
cucuaucgauuaugugugaacu

SEQ ID NO: 95058 - RNA, 22 nt, Artificial Sequence
  LRRK2 RNA guide
gaacuauuucaacuaaaacgca

SEQ ID NO: 95059 - RNA, 22 nt, Artificial Sequence
  LRRK2 RNA guide
gcguuuuaguugaaauaguuca

SEQ ID NO: 95060 - RNA, 22 nt, Artificial Sequence
  LRRK2 RNA guide
gugaacuauuucaacuaaaacg

SEQ ID NO: 95061 - RNA, 22 nt, Artificial Sequence
  LRRK2 RNA guide
guugcguuuuaguugaaauagu

SEQ ID NO: 95062 - RNA, 22 nt, Artificial Sequence
  LRRK2 RNA guide
ucgauuaugugugaacuauuuc

SEQ ID NO: 95063 - RNA, 22 nt, Artificial Sequence
  LRRK2 RNA guide
ucuaucgauuaugugugaacua

SEQ ID NO: 95064 - RNA, 22 nt, Artificial Sequence
  LRRK2 RNA guide
ugaaauaguucacacauaaucg

SEQ ID NO: 95065 - RNA, 22 nt, Artificial Sequence
  LRRK2 RNA guide
ugaacuauuucaacuaaaacgc

SEQ ID NO: 95066 - RNA, 22 nt, Artificial Sequence
  LRRK2 RNA guide
ugcguuuuaguugaaauaguuc

SEQ ID NO: 95067 - RNA, 20 nt, Artificial Sequence
  LRRK2 RNA guide
aacgcaacuuauuuuucauc

SEQ ID NO: 95068 - RNA, 20 nt, Artificial Sequence
  LRRK2 RNA guide
acgcaacuuauuuuucauca

SEQ ID NO: 95069 - RNA, 20 nt, Artificial Sequence
  LRRK2 RNA guide
caacuaaaacgcaacuuauu

SEQ ID NO: 95070 - RNA, 20 nt, Artificial Sequence
  LRRK2 RNA guide
ccuugaugaaaaauaaguug

SEQ ID NO: 95071 - RNA, 20 nt, Artificial Sequence
  LRRK2 RNA guide
cugccuugaugaaaaauaag

SEQ ID NO: 95072 - RNA, 20 nt, Artificial Sequence
  LRRK2 RNA guide
cuugaugaaaaauaaguugc

SEQ ID NO: 95073 - RNA, 20 nt, Artificial Sequence
  LRRK2 RNA guide
gaugaaaaauaaguugcguu

SEQ ID NO: 95074 - RNA, 20 nt, Artificial Sequence
  LRRK2 RNA guide
gccuugaugaaaaauaaguu

SEQ ID NO: 95075 - RNA, 20 nt, Artificial Sequence
  LRRK2 RNA guide
ugaugaaaaauaaguugcgu

SEQ ID NO: 95076 - RNA, 20 nt, Artificial Sequence
  LRRK2 RNA guide
ugccuugaugaaaaauaagu

SEQ ID NO: 95077 - RNA, 20 nt, Artificial Sequence
  LRRK2 RNA guide
uugaugaaaaauaaguugcg

SEQ ID NO: 95078 - RNA, 21 nt, Artificial Sequence
  LRRK2 RNA guide
acugccuugaugaaaaauaag

SEQ ID NO: 95079 - RNA, 21 nt, Artificial Sequence
  LRRK2 RNA guide
ccuugaugaaaaauaaguugc

SEQ ID NO: 95080 - RNA, 21 nt, Artificial Sequence
  LRRK2 RNA guide
cugccuugaugaaaaauaagu

SEQ ID NO: 95081 - RNA, 21 nt, Artificial Sequence
  LRRK2 RNA guide
cuugaugaaaaauaaguugcg

SEQ ID NO: 95082 - RNA, 21 nt, Artificial Sequence
  LRRK2 RNA guide
gccuugaugaaaaauaaguug

SEQ ID NO: 95083 - RNA, 22 nt, Artificial Sequence
  LRRK2 RNA guide
acgcaacuuauuuuucaucaag

SEQ ID NO: 95084 - RNA, 22 nt, Artificial Sequence
  LRRK2 RNA guide
acugccuugaugaaaaauaagu

SEQ ID NO: 95085 - RNA, 22 nt, Artificial Sequence
  LRRK2 RNA guide
cacugccuugaugaaaaauaag

SEQ ID NO: 95086 - RNA, 22 nt, Artificial Sequence
  LRRK2 RNA guide
ccuugaugaaaaauaaguugcg

SEQ ID NO: 95087 - RNA, 22 nt, Artificial Sequence
  LRRK2 RNA guide
cugccuugaugaaaaauaaguu

SEQ ID NO: 95088 - RNA, 22 nt, Artificial Sequence
  LRRK2 RNA guide
cuugaugaaaaauaaguugcgu

SEQ ID NO: 95089 - RNA, 22 nt, Artificial Sequence
  LRRK2 RNA guide
gccuugaugaaaaauaaguugc

SEQ ID NO: 95090 - RNA, 22 nt, Artificial Sequence
  LRRK2 RNA guide
ugccuugaugaaaaauaaguug

SEQ ID NO: 95091 - RNA, 22 nt, Artificial Sequence
  LRRK2 RNA guide
ccuugaugaaaaauaaguugca

SEQ ID NO: 95092 - RNA, 20 nt, Artificial Sequence
  LRRK2 RNA guide
aaggcagugaaauauauuga

SEQ ID NO: 95093 - RNA, 20 nt, Artificial Sequence
  LRRK2 RNA guide
aauucugcuauguuucauca

SEQ ID NO: 95094 - RNA, 20 nt, Artificial Sequence
  LRRK2 RNA guide
aggcagugaaauauauugau

SEQ ID NO: 95095 - RNA, 20 nt, Artificial Sequence
  LRRK2 RNA guide
auauugaugaaacauagcag

SEQ ID NO: 95096 - RNA, 20 nt, Artificial Sequence
  LRRK2 RNA guide
aucaaggcagugaaauauau

SEQ ID NO: 95097 - RNA, 20 nt, Artificial Sequence
  LRRK2 RNA guide
aucaauauauuucacugccu

SEQ ID NO: 95098 - RNA, 20 nt, Artificial Sequence
  LRRK2 RNA guide
auucugcuauguuucaucaa

SEQ ID NO: 95099 - RNA, 20 nt, Artificial Sequence
  LRRK2 RNA guide
auugaugaaacauagcagaa

SEQ ID NO: 95100 - RNA, 20 nt, Artificial Sequence
  LRRK2 RNA guide
caaggcagugaaauauauug

SEQ ID NO: 95101 - RNA, 20 nt, Artificial Sequence
  LRRK2 RNA guide
caucaaggcagugaaauaua

SEQ ID NO: 95102 - RNA, 20 nt, Artificial Sequence
  LRRK2 RNA guide
caucaauauauuucacugcc

SEQ ID NO: 95103 - RNA, 20 nt, Artificial Sequence
  LRRK2 RNA guide
cugcuauguuucaucaauau

SEQ ID NO: 95104 - RNA, 20 nt, Artificial Sequence
  LRRK2 RNA guide
gcagugaaauauauugauga

SEQ ID NO: 95105 - RNA, 20 nt, Artificial Sequence
  LRRK2 RNA guide
ggcagugaaauauauugaug

SEQ ID NO: 95106 - RNA, 20 nt, Artificial Sequence
  LRRK2 RNA guide
gguaauucugcuauguuuca

SEQ ID NO: 95107 - RNA, 20 nt, Artificial Sequence
  LRRK2 RNA guide
guaauucugcuauguuucau

SEQ ID NO: 95108 - RNA, 20 nt, Artificial Sequence
  LRRK2 RNA guide
uaauucugcuauguuucauc

SEQ ID NO: 95109 - RNA, 20 nt, Artificial Sequence
  LRRK2 RNA guide
uauugaugaaacauagcaga

SEQ ID NO: 95110 - RNA, 20 nt, Artificial Sequence
  LRRK2 RNA guide
ucaaggcagugaaauauauu

SEQ ID NO: 95111 - RNA, 20 nt, Artificial Sequence
  LRRK2 RNA guide
ucaauauauuucacugccuu

SEQ ID NO: 95112 - RNA, 20 nt, Artificial Sequence
  LRRK2 RNA guide
ucaucaaggcagugaaauau

SEQ ID NO: 95113 - RNA, 20 nt, Artificial Sequence
  LRRK2 RNA guide
ucaucaauauauuucacugc

SEQ ID NO: 95114 - RNA, 20 nt, Artificial Sequence
  LRRK2 RNA guide
ucugcuauguuucaucaaua

SEQ ID NO: 95115 - RNA, 20 nt, Artificial Sequence
  LRRK2 RNA guide
ugaugaaacauagcagaauu

SEQ ID NO: 95116 - RNA, 20 nt, Artificial Sequence
  LRRK2 RNA guide
ugguaauucugcuauguuuc

SEQ ID NO: 95117 - RNA, 20 nt, Artificial Sequence
  LRRK2 RNA guide
uucaucaaggcagugaaaua

SEQ ID NO: 95118 - RNA, 20 nt, Artificial Sequence
  LRRK2 RNA guide
uucugcuauguuucaucaau

SEQ ID NO: 95119 - RNA, 20 nt, Artificial Sequence
  LRRK2 RNA guide
uugaugaaacauagcagaau

SEQ ID NO: 95120 - RNA, 20 nt, Artificial Sequence
  LRRK2 RNA guide
uugguaauucugcuauguuu

SEQ ID NO: 95121 - RNA, 20 nt, Artificial Sequence
  LRRK2 RNA guide
uuugguaauucugcuauguu

SEQ ID NO: 95122 - RNA, 21 nt, Artificial Sequence
  LRRK2 RNA guide
aggcagugaaauauauugaug

SEQ ID NO: 95123 - RNA, 21 nt, Artificial Sequence
  LRRK2 RNA guide
caaggcagugaaauauauuga

SEQ ID NO: 95124 - RNA, 21 nt, Artificial Sequence
  LRRK2 RNA guide
caucaaggcagugaaauauau

SEQ ID NO: 95125 - RNA, 21 nt, Artificial Sequence
  LRRK2 RNA guide
caucaauauauuucacugccu

SEQ ID NO: 95126 - RNA, 21 nt, Artificial Sequence
  LRRK2 RNA guide
ggcagugaaauauauugauga

SEQ ID NO: 95127 - RNA, 21 nt, Artificial Sequence
  LRRK2 RNA guide
gguaauucugcuauguuucau

SEQ ID NO: 95128 - RNA, 21 nt, Artificial Sequence
  LRRK2 RNA guide
guaauucugcuauguuucauc

SEQ ID NO: 95129 - RNA, 21 nt, Artificial Sequence
  LRRK2 RNA guide
ucaaggcagugaaauauauug

SEQ ID NO: 95130 - RNA, 21 nt, Artificial Sequence
  LRRK2 RNA guide
ucaauauauuucacugccuug

SEQ ID NO: 95131 - RNA, 21 nt, Artificial Sequence
  LRRK2 RNA guide
ucaucaaggcagugaaauaua

SEQ ID NO: 95132 - RNA, 21 nt, Artificial Sequence
  LRRK2 RNA guide
ucaucaauauauuucacugcc

SEQ ID NO: 95133 - RNA, 21 nt, Artificial Sequence
  LRRK2 RNA guide
ugguaauucugcuauguuuca

SEQ ID NO: 95134 - RNA, 21 nt, Artificial Sequence
  LRRK2 RNA guide
uucaucaaggcagugaaauau

SEQ ID NO: 95135 - RNA, 21 nt, Artificial Sequence
  LRRK2 RNA guide
uugguaauucugcuauguuuc

SEQ ID NO: 95136 - RNA, 21 nt, Artificial Sequence
  LRRK2 RNA guide
uuucaucaaggcagugaaaua

SEQ ID NO: 95137 - RNA, 22 nt, Artificial Sequence
  LRRK2 RNA guide
aaggcagugaaauauauugaug

SEQ ID NO: 95138 - RNA, 22 nt, Artificial Sequence
  LRRK2 RNA guide
aggcagugaaauauauugauga

SEQ ID NO: 95139 - RNA, 22 nt, Artificial Sequence
  LRRK2 RNA guide
aucaaggcagugaaauauauug

SEQ ID NO: 95140 - RNA, 22 nt, Artificial Sequence
  LRRK2 RNA guide
aucaauauauuucacugccuug

SEQ ID NO: 95141 - RNA, 22 nt, Artificial Sequence
  LRRK2 RNA guide
caaggcagugaaauauauugau

SEQ ID NO: 95142 - RNA, 22 nt, Artificial Sequence
  LRRK2 RNA guide
caucaaggcagugaaauauauu

SEQ ID NO: 95143 - RNA, 22 nt, Artificial Sequence
  LRRK2 RNA guide
caucaauauauuucacugccuu

SEQ ID NO: 95144 - RNA, 22 nt, Artificial Sequence
  LRRK2 RNA guide
ggcagugaaauauauugaugaa

SEQ ID NO: 95145 - RNA, 22 nt, Artificial Sequence
  LRRK2 RNA guide
gguaauucugcuauguuucauc

SEQ ID NO: 95146 - RNA, 22 nt, Artificial Sequence
  LRRK2 RNA guide
guaauucugcuauguuucauca

SEQ ID NO: 95147 - RNA, 22 nt, Artificial Sequence
  LRRK2 RNA guide
ucaaggcagugaaauauauuga

SEQ ID NO: 95148 - RNA, 22 nt, Artificial Sequence
  LRRK2 RNA guide
ucaauauauuucacugccuuga

SEQ ID NO: 95149 - RNA, 22 nt, Artificial Sequence
  LRRK2 RNA guide
ucaucaaggcagugaaauauau

SEQ ID NO: 95150 - RNA, 22 nt, Artificial Sequence
  LRRK2 RNA guide
ucaucaauauauuucacugccu

SEQ ID NO: 95151 - RNA, 22 nt, Artificial Sequence
  LRRK2 RNA guide
ugaugaaacauagcagaauuac

SEQ ID NO: 95152 - RNA, 22 nt, Artificial Sequence
  LRRK2 RNA guide
ugguaauucugcuauguuucau

SEQ ID NO: 95153 - RNA, 22 nt, Artificial Sequence
  LRRK2 RNA guide
uucaucaaggcagugaaauaua

SEQ ID NO: 95154 - RNA, 22 nt, Artificial Sequence
  LRRK2 RNA guide
uucaucaauauauuucacugcc

SEQ ID NO: 95155 - RNA, 22 nt, Artificial Sequence
  LRRK2 RNA guide
uugguaauucugcuauguuuca

SEQ ID NO: 95156 - RNA, 22 nt, Artificial Sequence
  LRRK2 RNA guide
uuucaucaaggcagugaaauau

SEQ ID NO: 95157 - RNA, 22 nt, Artificial Sequence
  LRRK2 RNA guide
uuugguaauucugcuauguuuc

SEQ ID NO: 95158 - RNA, 22 nt, Artificial Sequence
  LRRK2 RNA guide
uuuucaucaaggcagugaaaua

SEQ ID NO: 95159 - RNA, 20 nt, Artificial Sequence
  LRRK2 RNA guide
caaggcagugaaauauauuu

SEQ ID NO: 95160 - RNA, 20 nt, Artificial Sequence
  LRRK2 RNA guide
cauaaauauauuucacugcc

SEQ ID NO: 95161 - RNA, 20 nt, Artificial Sequence
  LRRK2 RNA guide
ggcagugaaauauauuuaug

SEQ ID NO: 95162 - RNA, 22 nt, Artificial Sequence
  LRRK2 RNA guide
gguaauucugcuauguuucaua

SEQ ID NO: 95163 - RNA, 20 nt, Artificial Sequence
  LRRK2 RNA guide
aaagaaccacguacguaggu

SEQ ID NO: 95164 - RNA, 20 nt, Artificial Sequence
  LRRK2 RNA guide
aaaggcaccuacguacgugg

SEQ ID NO: 95165 - RNA, 20 nt, Artificial Sequence
  LRRK2 RNA guide
aaauuagaaagaaccacgua

SEQ ID NO: 95166 - RNA, 20 nt, Artificial Sequence
  LRRK2 RNA guide
aaccacguacguaggugccu

SEQ ID NO: 95167 - RNA, 20 nt, Artificial Sequence
  LRRK2 RNA guide
aagaaccacguacguaggug

SEQ ID NO: 95168 - RNA, 20 nt, Artificial Sequence
  LRRK2 RNA guide
aaggcaccuacguacguggu

SEQ ID NO: 95169 - RNA, 20 nt, Artificial Sequence
  LRRK2 RNA guide
aaucuggcugcuuaaaggca

SEQ ID NO: 95170 - RNA, 20 nt, Artificial Sequence
  LRRK2 RNA guide
aauuagaaagaaccacguac

SEQ ID NO: 95171 - RNA, 20 nt, Artificial Sequence
  LRRK2 RNA guide
acaaauuagaaagaaccacg

SEQ ID NO: 95172 - RNA, 20 nt, Artificial Sequence
  LRRK2 RNA guide
accacguacguaggugccuu

SEQ ID NO: 95173 - RNA, 20 nt, Artificial Sequence
  LRRK2 RNA guide
accuacguacgugguucuuu

SEQ ID NO: 95174 - RNA, 20 nt, Artificial Sequence
  LRRK2 RNA guide
acguacguaggugccuuuaa

SEQ ID NO: 95175 - RNA, 20 nt, Artificial Sequence
  LRRK2 RNA guide
acguacgugguucuuucuaa

SEQ ID NO: 95176 - RNA, 20 nt, Artificial Sequence
  LRRK2 RNA guide
acguaggugccuuuaagcag

SEQ ID NO: 95177 - RNA, 20 nt, Artificial Sequence
  LRRK2 RNA guide
agaaagaaccacguacguag

SEQ ID NO: 95178 - RNA, 20 nt, Artificial Sequence
  LRRK2 RNA guide
agaaccacguacguaggugc

SEQ ID NO: 95179 - RNA, 20 nt, Artificial Sequence
  LRRK2 RNA guide
aggcaccuacguacgugguu

SEQ ID NO: 95180 - RNA, 20 nt, Artificial Sequence
  LRRK2 RNA guide
aucuggcugcuuaaaggcac

SEQ ID NO: 95181 - RNA, 20 nt, Artificial Sequence
  LRRK2 RNA guide
auuagaaagaaccacguacg

SEQ ID NO: 95182 - RNA, 20 nt, Artificial Sequence
  LRRK2 RNA guide
caaauuagaaagaaccacgu

SEQ ID NO: 95183 - RNA, 20 nt, Artificial Sequence
  LRRK2 RNA guide
caccuacguacgugguucuu

SEQ ID NO: 95184 - RNA, 20 nt, Artificial Sequence
  LRRK2 RNA guide
cacguacguaggugccuuua

SEQ ID NO: 95185 - RNA, 20 nt, Artificial Sequence
  LRRK2 RNA guide
ccacguacguaggugccuuu

SEQ ID NO: 95186 - RNA, 20 nt, Artificial Sequence
  LRRK2 RNA guide
ccuacguacgugguucuuuc

SEQ ID NO: 95187 - RNA, 20 nt, Artificial Sequence
  LRRK2 RNA guide
cguacguaggugccuuuaag

SEQ ID NO: 95188 - RNA, 20 nt, Artificial Sequence
  LRRK2 RNA guide
cguaggugccuuuaagcagc

SEQ ID NO: 95189 - RNA, 20 nt, Artificial Sequence
  LRRK2 RNA guide
cuacguacgugguucuuucu

SEQ ID NO: 95190 - RNA, 20 nt, Artificial Sequence
  LRRK2 RNA guide
cugcuuaaaggcaccuacgu

SEQ ID NO: 95191 - RNA, 20 nt, Artificial Sequence
  LRRK2 RNA guide
cuggcugcuuaaaggcaccu

SEQ ID NO: 95192 - RNA, 20 nt, Artificial Sequence
  LRRK2 RNA guide
cuuaaaggcaccuacguacg

SEQ ID NO: 95193 - RNA, 20 nt, Artificial Sequence
  LRRK2 RNA guide
gaaagaaccacguacguagg

SEQ ID NO: 95194 - RNA, 20 nt, Artificial Sequence
  LRRK2 RNA guide
gaaccacguacguaggugcc

SEQ ID NO: 95195 - RNA, 20 nt, Artificial Sequence
  LRRK2 RNA guide
gacaaauuagaaagaaccac

SEQ ID NO: 95196 - RNA, 20 nt, Artificial Sequence
  LRRK2 RNA guide
gcaccuacguacgugguucu

SEQ ID NO: 95197 - RNA, 20 nt, Artificial Sequence
  LRRK2 RNA guide
gcugcuuaaaggcaccuacg

SEQ ID NO: 95198 - RNA, 20 nt, Artificial Sequence
  LRRK2 RNA guide
gcuuaaaggcaccuacguac

SEQ ID NO: 95199 - RNA, 20 nt, Artificial Sequence
  LRRK2 RNA guide
ggcaccuacguacgugguuc

SEQ ID NO: 95200 - RNA, 20 nt, Artificial Sequence
  LRRK2 RNA guide
ggcugcuuaaaggcaccuac

SEQ ID NO: 95201 - RNA, 20 nt, Artificial Sequence
  LRRK2 RNA guide
guacguaggugccuuuaagc

SEQ ID NO: 95202 - RNA, 20 nt, Artificial Sequence
  LRRK2 RNA guide
uaaaggcaccuacguacgug

SEQ ID NO: 95203 - RNA, 20 nt, Artificial Sequence
  LRRK2 RNA guide
uacguacgugguucuuucua

SEQ ID NO: 95204 - RNA, 20 nt, Artificial Sequence
  LRRK2 RNA guide
uacguaggugccuuuaagca

SEQ ID NO: 95205 - RNA, 20 nt, Artificial Sequence
  LRRK2 RNA guide
uagaaagaaccacguacgua

SEQ ID NO: 95206 - RNA, 20 nt, Artificial Sequence
  LRRK2 RNA guide
ucuggcugcuuaaaggcacc

SEQ ID NO: 95207 - RNA, 20 nt, Artificial Sequence
  LRRK2 RNA guide
ugcuuaaaggcaccuacgua

SEQ ID NO: 95208 - RNA, 20 nt, Artificial Sequence
  LRRK2 RNA guide
uggcugcuuaaaggcaccua

SEQ ID NO: 95209 - RNA, 20 nt, Artificial Sequence
  LRRK2 RNA guide
uuaaaggcaccuacguacgu

SEQ ID NO: 95210 - RNA, 20 nt, Artificial Sequence
  LRRK2 RNA guide
uuagaaagaaccacguacgu

SEQ ID NO: 95211 - RNA, 21 nt, Artificial Sequence
  LRRK2 RNA guide
aaagaaccacguacguaggug

SEQ ID NO: 95212 - RNA, 21 nt, Artificial Sequence
  LRRK2 RNA guide
aaaggcaccuacguacguggu

SEQ ID NO: 95213 - RNA, 21 nt, Artificial Sequence
  LRRK2 RNA guide
aaauuagaaagaaccacguac

SEQ ID NO: 95214 - RNA, 21 nt, Artificial Sequence
  LRRK2 RNA guide
aaccacguacguaggugccuu

SEQ ID NO: 95215 - RNA, 21 nt, Artificial Sequence
  LRRK2 RNA guide
aagaaccacguacguaggugc

SEQ ID NO: 95216 - RNA, 21 nt, Artificial Sequence
  LRRK2 RNA guide
aaggcaccuacguacgugguu

SEQ ID NO: 95217 - RNA, 21 nt, Artificial Sequence
  LRRK2 RNA guide
aaucuggcugcuuaaaggcac

SEQ ID NO: 95218 - RNA, 21 nt, Artificial Sequence
  LRRK2 RNA guide
aauuagaaagaaccacguacg

SEQ ID NO: 95219 - RNA, 21 nt, Artificial Sequence
  LRRK2 RNA guide
acaaauuagaaagaaccacgu

SEQ ID NO: 95220 - RNA, 21 nt, Artificial Sequence
  LRRK2 RNA guide
accacguacguaggugccuuu

SEQ ID NO: 95221 - RNA, 21 nt, Artificial Sequence
  LRRK2 RNA guide
accuacguacgugguucuuuc

SEQ ID NO: 95222 - RNA, 21 nt, Artificial Sequence
  LRRK2 RNA guide
acguacguaggugccuuuaag

SEQ ID NO: 95223 - RNA, 21 nt, Artificial Sequence
  LRRK2 RNA guide
acguacgugguucuuucuaau

SEQ ID NO: 95224 - RNA, 21 nt, Artificial Sequence
  LRRK2 RNA guide
acguaggugccuuuaagcagc

SEQ ID NO: 95225 - RNA, 21 nt, Artificial Sequence
  LRRK2 RNA guide
agaaagaaccacguacguagg

SEQ ID NO: 95226 - RNA, 21 nt, Artificial Sequence
  LRRK2 RNA guide
agaaccacguacguaggugcc

SEQ ID NO: 95227 - RNA, 21 nt, Artificial Sequence
  LRRK2 RNA guide
aggcaccuacguacgugguuc

SEQ ID NO: 95228 - RNA, 21 nt, Artificial Sequence
  LRRK2 RNA guide
aucuggcugcuuaaaggcacc

SEQ ID NO: 95229 - RNA, 21 nt, Artificial Sequence
  LRRK2 RNA guide
auuagaaagaaccacguacgu

SEQ ID NO: 95230 - RNA, 21 nt, Artificial Sequence
  LRRK2 RNA guide
caaauuagaaagaaccacgua

SEQ ID NO: 95231 - RNA, 21 nt, Artificial Sequence
  LRRK2 RNA guide
caccuacguacgugguucuuu

SEQ ID NO: 95232 - RNA, 21 nt, Artificial Sequence
  LRRK2 RNA guide
cacguacguaggugccuuuaa

SEQ ID NO: 95233 - RNA, 21 nt, Artificial Sequence
  LRRK2 RNA guide
ccacguacguaggugccuuua

SEQ ID NO: 95234 - RNA, 21 nt, Artificial Sequence
  LRRK2 RNA guide
ccuacguacgugguucuuucu

SEQ ID NO: 95235 - RNA, 21 nt, Artificial Sequence
  LRRK2 RNA guide
cguacguaggugccuuuaagc

SEQ ID NO: 95236 - RNA, 21 nt, Artificial Sequence
  LRRK2 RNA guide
cguaggugccuuuaagcagcc

SEQ ID NO: 95237 - RNA, 21 nt, Artificial Sequence
  LRRK2 RNA guide
cuacguacgugguucuuucua

SEQ ID NO: 95238 - RNA, 21 nt, Artificial Sequence
  LRRK2 RNA guide
cugcuuaaaggcaccuacgua

SEQ ID NO: 95239 - RNA, 21 nt, Artificial Sequence
  LRRK2 RNA guide
cuggcugcuuaaaggcaccua

SEQ ID NO: 95240 - RNA, 21 nt, Artificial Sequence
  LRRK2 RNA guide
cuuaaaggcaccuacguacgu

SEQ ID NO: 95241 - RNA, 21 nt, Artificial Sequence
  LRRK2 RNA guide
gaaagaaccacguacguaggu

SEQ ID NO: 95242 - RNA, 21 nt, Artificial Sequence
  LRRK2 RNA guide
gaaccacguacguaggugccu

SEQ ID NO: 95243 - RNA, 21 nt, Artificial Sequence
  LRRK2 RNA guide
gaaucuggcugcuuaaaggca

SEQ ID NO: 95244 - RNA, 21 nt, Artificial Sequence
  LRRK2 RNA guide
gacaaauuagaaagaaccacg

SEQ ID NO: 95245 - RNA, 21 nt, Artificial Sequence
  LRRK2 RNA guide
gcaccuacguacgugguucuu

SEQ ID NO: 95246 - RNA, 21 nt, Artificial Sequence
  LRRK2 RNA guide
gcugcuuaaaggcaccuacgu

SEQ ID NO: 95247 - RNA, 21 nt, Artificial Sequence
  LRRK2 RNA guide
gcuuaaaggcaccuacguacg

SEQ ID NO: 95248 - RNA, 21 nt, Artificial Sequence
  LRRK2 RNA guide
ggcaccuacguacgugguucu

SEQ ID NO: 95249 - RNA, 21 nt, Artificial Sequence
  LRRK2 RNA guide
ggcugcuuaaaggcaccuacg

SEQ ID NO: 95250 - RNA, 21 nt, Artificial Sequence
  LRRK2 RNA guide
guacguaggugccuuuaagca

SEQ ID NO: 95251 - RNA, 21 nt, Artificial Sequence
  LRRK2 RNA guide
uaaaggcaccuacguacgugg

SEQ ID NO: 95252 - RNA, 21 nt, Artificial Sequence
  LRRK2 RNA guide
uacguacgugguucuuucuaa

SEQ ID NO: 95253 - RNA, 21 nt, Artificial Sequence
  LRRK2 RNA guide
uacguaggugccuuuaagcag

SEQ ID NO: 95254 - RNA, 21 nt, Artificial Sequence
  LRRK2 RNA guide
uagaaagaaccacguacguag

SEQ ID NO: 95255 - RNA, 21 nt, Artificial Sequence
  LRRK2 RNA guide
ucuggcugcuuaaaggcaccu

SEQ ID NO: 95256 - RNA, 21 nt, Artificial Sequence
  LRRK2 RNA guide
ugacaaauuagaaagaaccac

SEQ ID NO: 95257 - RNA, 21 nt, Artificial Sequence
  LRRK2 RNA guide
ugcuuaaaggcaccuacguac

SEQ ID NO: 95258 - RNA, 21 nt, Artificial Sequence
  LRRK2 RNA guide
uggcugcuuaaaggcaccuac

SEQ ID NO: 95259 - RNA, 21 nt, Artificial Sequence
  LRRK2 RNA guide
uuaaaggcaccuacguacgug

SEQ ID NO: 95260 - RNA, 21 nt, Artificial Sequence
  LRRK2 RNA guide
uuagaaagaaccacguacgua

SEQ ID NO: 95261 - RNA, 22 nt, Artificial Sequence
  LRRK2 RNA guide
aaagaaccacguacguaggugc

SEQ ID NO: 95262 - RNA, 22 nt, Artificial Sequence
  LRRK2 RNA guide
aaaggcaccuacguacgugguu

SEQ ID NO: 95263 - RNA, 22 nt, Artificial Sequence
  LRRK2 RNA guide
aaauuagaaagaaccacguacg

SEQ ID NO: 95264 - RNA, 22 nt, Artificial Sequence
  LRRK2 RNA guide
aaccacguacguaggugccuuu

SEQ ID NO: 95265 - RNA, 22 nt, Artificial Sequence
  LRRK2 RNA guide
aagaaccacguacguaggugcc

SEQ ID NO: 95266 - RNA, 22 nt, Artificial Sequence
  LRRK2 RNA guide
aaggcaccuacguacgugguuc

SEQ ID NO: 95267 - RNA, 22 nt, Artificial Sequence
  LRRK2 RNA guide
aaucuggcugcuuaaaggcacc

SEQ ID NO: 95268 - RNA, 22 nt, Artificial Sequence
  LRRK2 RNA guide
aauuagaaagaaccacguacgu

SEQ ID NO: 95269 - RNA, 22 nt, Artificial Sequence
  LRRK2 RNA guide
acaaauuagaaagaaccacgua

SEQ ID NO: 95270 - RNA, 22 nt, Artificial Sequence
  LRRK2 RNA guide
accacguacguaggugccuuua

SEQ ID NO: 95271 - RNA, 22 nt, Artificial Sequence
  LRRK2 RNA guide
accuacguacgugguucuuucu

SEQ ID NO: 95272 - RNA, 22 nt, Artificial Sequence
  LRRK2 RNA guide
acguacguaggugccuuuaagc

SEQ ID NO: 95273 - RNA, 22 nt, Artificial Sequence
  LRRK2 RNA guide
acguacgugguucuuucuaauu

SEQ ID NO: 95274 - RNA, 22 nt, Artificial Sequence
  LRRK2 RNA guide
acguaggugccuuuaagcagcc

SEQ ID NO: 95275 - RNA, 22 nt, Artificial Sequence
  LRRK2 RNA guide
agaaagaaccacguacguaggu

SEQ ID NO: 95276 - RNA, 22 nt, Artificial Sequence
  LRRK2 RNA guide
agaaccacguacguaggugccu

SEQ ID NO: 95277 - RNA, 22 nt, Artificial Sequence
  LRRK2 RNA guide
agaaucuggcugcuuaaaggca

SEQ ID NO: 95278 - RNA, 22 nt, Artificial Sequence
  LRRK2 RNA guide
aggcaccuacguacgugguucu

SEQ ID NO: 95279 - RNA, 22 nt, Artificial Sequence
  LRRK2 RNA guide
aucuggcugcuuaaaggcaccu

SEQ ID NO: 95280 - RNA, 22 nt, Artificial Sequence
  LRRK2 RNA guide
auuagaaagaaccacguacgua

SEQ ID NO: 95281 - RNA, 22 nt, Artificial Sequence
  LRRK2 RNA guide
caaauuagaaagaaccacguac

SEQ ID NO: 95282 - RNA, 22 nt, Artificial Sequence
  LRRK2 RNA guide
caccuacguacgugguucuuuc

SEQ ID NO: 95283 - RNA, 22 nt, Artificial Sequence
  LRRK2 RNA guide
cacguacguaggugccuuuaag

SEQ ID NO: 95284 - RNA, 22 nt, Artificial Sequence
  LRRK2 RNA guide
ccacguacguaggugccuuuaa

SEQ ID NO: 95285 - RNA, 22 nt, Artificial Sequence
  LRRK2 RNA guide
ccuacguacgugguucuuucua

SEQ ID NO: 95286 - RNA, 22 nt, Artificial Sequence
  LRRK2 RNA guide
cguacguaggugccuuuaagca

SEQ ID NO: 95287 - RNA, 22 nt, Artificial Sequence
  LRRK2 RNA guide
cguaggugccuuuaagcagcca

SEQ ID NO: 95288 - RNA, 22 nt, Artificial Sequence
  LRRK2 RNA guide
cuacguacgugguucuuucuaa

SEQ ID NO: 95289 - RNA, 22 nt, Artificial Sequence
  LRRK2 RNA guide
cugcuuaaaggcaccuacguac

SEQ ID NO: 95290 - RNA, 22 nt, Artificial Sequence
  LRRK2 RNA guide
cuggcugcuuaaaggcaccuac

SEQ ID NO: 95291 - RNA, 22 nt, Artificial Sequence
  LRRK2 RNA guide
cuuaaaggcaccuacguacgug

SEQ ID NO: 95292 - RNA, 22 nt, Artificial Sequence
  LRRK2 RNA guide
gaaagaaccacguacguaggug

SEQ ID NO: 95293 - RNA, 22 nt, Artificial Sequence
  LRRK2 RNA guide
gaaccacguacguaggugccuu

SEQ ID NO: 95294 - RNA, 22 nt, Artificial Sequence
  LRRK2 RNA guide
gaaucuggcugcuuaaaggcac

SEQ ID NO: 95295 - RNA, 22 nt, Artificial Sequence
  LRRK2 RNA guide
gacaaauuagaaagaaccacgu

SEQ ID NO: 95296 - RNA, 22 nt, Artificial Sequence
  LRRK2 RNA guide
gcaccuacguacgugguucuuu

SEQ ID NO: 95297 - RNA, 22 nt, Artificial Sequence
  LRRK2 RNA guide
gcugcuuaaaggcaccuacgua

SEQ ID NO: 95298 - RNA, 22 nt, Artificial Sequence
  LRRK2 RNA guide
gcuuaaaggcaccuacguacgu

SEQ ID NO: 95299 - RNA, 22 nt, Artificial Sequence
  LRRK2 RNA guide
ggcaccuacguacgugguucuu

SEQ ID NO: 95300 - RNA, 22 nt, Artificial Sequence
  LRRK2 RNA guide
ggcugcuuaaaggcaccuacgu

SEQ ID NO: 95301 - RNA, 22 nt, Artificial Sequence
  LRRK2 RNA guide
guacguaggugccuuuaagcag

SEQ ID NO: 95302 - RNA, 22 nt, Artificial Sequence
  LRRK2 RNA guide
uaaaggcaccuacguacguggu

SEQ ID NO: 95303 - RNA, 22 nt, Artificial Sequence
  LRRK2 RNA guide
uacguacgugguucuuucuaau

SEQ ID NO: 95304 - RNA, 22 nt, Artificial Sequence
  LRRK2 RNA guide
uacguaggugccuuuaagcagc

SEQ ID NO: 95305 - RNA, 22 nt, Artificial Sequence
  LRRK2 RNA guide
uagaaagaaccacguacguagg

SEQ ID NO: 95306 - RNA, 22 nt, Artificial Sequence
  LRRK2 RNA guide
ucuggcugcuuaaaggcaccua

SEQ ID NO: 95307 - RNA, 22 nt, Artificial Sequence
  LRRK2 RNA guide
ugacaaauuagaaagaaccacg

SEQ ID NO: 95308 - RNA, 22 nt, Artificial Sequence
  LRRK2 RNA guide
ugcuuaaaggcaccuacguacg

SEQ ID NO: 95309 - RNA, 22 nt, Artificial Sequence
  LRRK2 RNA guide
uggcugcuuaaaggcaccuacg

SEQ ID NO: 95310 - RNA, 22 nt, Artificial Sequence
  LRRK2 RNA guide
uuaaaggcaccuacguacgugg

SEQ ID NO: 95311 - RNA, 22 nt, Artificial Sequence
  LRRK2 RNA guide
uuagaaagaaccacguacguag

SEQ ID NO: 95312 - RNA, 22 nt, Artificial Sequence
  LRRK2 RNA guide
uugacaaauuagaaagaaccac

SEQ ID NO: 95313 - RNA, 20 nt, Artificial Sequence
  LRRK2 RNA guide
aaagaaccacguaccuaggu

SEQ ID NO: 95314 - RNA, 20 nt, Artificial Sequence
  LRRK2 RNA guide
aaaggcaccuagguacgugg

SEQ ID NO: 95315 - RNA, 20 nt, Artificial Sequence
  LRRK2 RNA guide
aaccacguaccuaggugccu

SEQ ID NO: 95316 - RNA, 20 nt, Artificial Sequence
  LRRK2 RNA guide
aagaaccacguaccuaggug

SEQ ID NO: 95317 - RNA, 20 nt, Artificial Sequence
  LRRK2 RNA guide
aaggcaccuagguacguggu

SEQ ID NO: 95318 - RNA, 20 nt, Artificial Sequence
  LRRK2 RNA guide
accacguaccuaggugccuu

SEQ ID NO: 95319 - RNA, 20 nt, Artificial Sequence
  LRRK2 RNA guide
accuagguacgugguucuuu

SEQ ID NO: 95320 - RNA, 20 nt, Artificial Sequence
  LRRK2 RNA guide
accuaggugccuuuaagcag

SEQ ID NO: 95321 - RNA, 20 nt, Artificial Sequence
  LRRK2 RNA guide
acguaccuaggugccuuuaa

SEQ ID NO: 95322 - RNA, 20 nt, Artificial Sequence
  LRRK2 RNA guide
agaaagaaccacguaccuag

SEQ ID NO: 95323 - RNA, 20 nt, Artificial Sequence
  LRRK2 RNA guide
agaaccacguaccuaggugc

SEQ ID NO: 95324 - RNA, 20 nt, Artificial Sequence
  LRRK2 RNA guide
aggcaccuagguacgugguu

SEQ ID NO: 95325 - RNA, 20 nt, Artificial Sequence
  LRRK2 RNA guide
agguacgugguucuuucuaa

SEQ ID NO: 95326 - RNA, 20 nt, Artificial Sequence
  LRRK2 RNA guide
auuagaaagaaccacguacc

SEQ ID NO: 95327 - RNA, 20 nt, Artificial Sequence
  LRRK2 RNA guide
caccuagguacgugguucuu

SEQ ID NO: 95328 - RNA, 20 nt, Artificial Sequence
  LRRK2 RNA guide
cacguaccuaggugccuuua

SEQ ID NO: 95329 - RNA, 20 nt, Artificial Sequence
  LRRK2 RNA guide
ccacguaccuaggugccuuu

SEQ ID NO: 95330 - RNA, 20 nt, Artificial Sequence
  LRRK2 RNA guide
ccuagguacgugguucuuuc

SEQ ID NO: 95331 - RNA, 20 nt, Artificial Sequence
  LRRK2 RNA guide
ccuaggugccuuuaagcagc

SEQ ID NO: 95332 - RNA, 20 nt, Artificial Sequence
  LRRK2 RNA guide
cguaccuaggugccuuuaag

SEQ ID NO: 95333 - RNA, 20 nt, Artificial Sequence
  LRRK2 RNA guide
cuagguacgugguucuuucu

SEQ ID NO: 95334 - RNA, 20 nt, Artificial Sequence
  LRRK2 RNA guide
cugcuuaaaggcaccuaggu

SEQ ID NO: 95335 - RNA, 20 nt, Artificial Sequence
  LRRK2 RNA guide
cuuaaaggcaccuagguacg

SEQ ID NO: 95336 - RNA, 20 nt, Artificial Sequence
  LRRK2 RNA guide
gaaagaaccacguaccuagg

SEQ ID NO: 95337 - RNA, 20 nt, Artificial Sequence
  LRRK2 RNA guide
gaaccacguaccuaggugcc

SEQ ID NO: 95338 - RNA, 20 nt, Artificial Sequence
  LRRK2 RNA guide
gcaccuagguacgugguucu

SEQ ID NO: 95339 - RNA, 20 nt, Artificial Sequence
  LRRK2 RNA guide
gcugcuuaaaggcaccuagg

SEQ ID NO: 95340 - RNA, 20 nt, Artificial Sequence
  LRRK2 RNA guide
gcuuaaaggcaccuagguac

SEQ ID NO: 95341 - RNA, 20 nt, Artificial Sequence
  LRRK2 RNA guide
ggcaccuagguacgugguuc

SEQ ID NO: 95342 - RNA, 20 nt, Artificial Sequence
  LRRK2 RNA guide
ggcugcuuaaaggcaccuag

SEQ ID NO: 95343 - RNA, 20 nt, Artificial Sequence
  LRRK2 RNA guide
guaccuaggugccuuuaagc

SEQ ID NO: 95344 - RNA, 20 nt, Artificial Sequence
  LRRK2 RNA guide
uaaaggcaccuagguacgug

SEQ ID NO: 95345 - RNA, 20 nt, Artificial Sequence
  LRRK2 RNA guide
uaccuaggugccuuuaagca

SEQ ID NO: 95346 - RNA, 20 nt, Artificial Sequence
  LRRK2 RNA guide
uagaaagaaccacguaccua

SEQ ID NO: 95347 - RNA, 20 nt, Artificial Sequence
  LRRK2 RNA guide
uagguacgugguucuuucua

SEQ ID NO: 95348 - RNA, 20 nt, Artificial Sequence
  LRRK2 RNA guide
ugcuuaaaggcaccuaggua

SEQ ID NO: 95349 - RNA, 20 nt, Artificial Sequence
  LRRK2 RNA guide
uuaaaggcaccuagguacgu

SEQ ID NO: 95350 - RNA, 20 nt, Artificial Sequence
  LRRK2 RNA guide
uuagaaagaaccacguaccu

SEQ ID NO: 95351 - RNA, 21 nt, Artificial Sequence
  LRRK2 RNA guide
aaagaaccacguaccuaggug

SEQ ID NO: 95352 - RNA, 21 nt, Artificial Sequence
  LRRK2 RNA guide
aaaggcaccuagguacguggu

SEQ ID NO: 95353 - RNA, 21 nt, Artificial Sequence
  LRRK2 RNA guide
aaccacguaccuaggugccuu

SEQ ID NO: 95354 - RNA, 21 nt, Artificial Sequence
  LRRK2 RNA guide
aagaaccacguaccuaggugc

SEQ ID NO: 95355 - RNA, 21 nt, Artificial Sequence
  LRRK2 RNA guide
aaggcaccuagguacgugguu

SEQ ID NO: 95356 - RNA, 21 nt, Artificial Sequence
  LRRK2 RNA guide
aauuagaaagaaccacguacc

SEQ ID NO: 95357 - RNA, 21 nt, Artificial Sequence
  LRRK2 RNA guide
accacguaccuaggugccuuu

SEQ ID NO: 95358 - RNA, 21 nt, Artificial Sequence
  LRRK2 RNA guide
accuagguacgugguucuuuc

SEQ ID NO: 95359 - RNA, 21 nt, Artificial Sequence
  LRRK2 RNA guide
accuaggugccuuuaagcagc

SEQ ID NO: 95360 - RNA, 21 nt, Artificial Sequence
  LRRK2 RNA guide
acguaccuaggugccuuuaag

SEQ ID NO: 95361 - RNA, 21 nt, Artificial Sequence
  LRRK2 RNA guide
agaaagaaccacguaccuagg

SEQ ID NO: 95362 - RNA, 21 nt, Artificial Sequence
  LRRK2 RNA guide
agaaccacguaccuaggugcc

SEQ ID NO: 95363 - RNA, 21 nt, Artificial Sequence
  LRRK2 RNA guide
aggcaccuagguacgugguuc

SEQ ID NO: 95364 - RNA, 21 nt, Artificial Sequence
  LRRK2 RNA guide
agguacgugguucuuucuaau

SEQ ID NO: 95365 - RNA, 21 nt, Artificial Sequence
  LRRK2 RNA guide
auuagaaagaaccacguaccu

SEQ ID NO: 95366 - RNA, 21 nt, Artificial Sequence
  LRRK2 RNA guide
caccuagguacgugguucuuu

SEQ ID NO: 95367 - RNA, 21 nt, Artificial Sequence
  LRRK2 RNA guide
cacguaccuaggugccuuuaa

SEQ ID NO: 95368 - RNA, 21 nt, Artificial Sequence
  LRRK2 RNA guide
ccacguaccuaggugccuuua

SEQ ID NO: 95369 - RNA, 21 nt, Artificial Sequence
  LRRK2 RNA guide
ccuagguacgugguucuuucu

SEQ ID NO: 95370 - RNA, 21 nt, Artificial Sequence
  LRRK2 RNA guide
ccuaggugccuuuaagcagcc

SEQ ID NO: 95371 - RNA, 21 nt, Artificial Sequence
  LRRK2 RNA guide
cguaccuaggugccuuuaagc

SEQ ID NO: 95372 - RNA, 21 nt, Artificial Sequence
  LRRK2 RNA guide
cuagguacgugguucuuucua

SEQ ID NO: 95373 - RNA, 21 nt, Artificial Sequence
  LRRK2 RNA guide
cugcuuaaaggcaccuaggua

SEQ ID NO: 95374 - RNA, 21 nt, Artificial Sequence
  LRRK2 RNA guide
cuuaaaggcaccuagguacgu

SEQ ID NO: 95375 - RNA, 21 nt, Artificial Sequence
  LRRK2 RNA guide
gaaagaaccacguaccuaggu

SEQ ID NO: 95376 - RNA, 21 nt, Artificial Sequence
  LRRK2 RNA guide
gaaccacguaccuaggugccu

SEQ ID NO: 95377 - RNA, 21 nt, Artificial Sequence
  LRRK2 RNA guide
gcaccuagguacgugguucuu

SEQ ID NO: 95378 - RNA, 21 nt, Artificial Sequence
  LRRK2 RNA guide
gcugcuuaaaggcaccuaggu

SEQ ID NO: 95379 - RNA, 21 nt, Artificial Sequence
  LRRK2 RNA guide
gcuuaaaggcaccuagguacg

SEQ ID NO: 95380 - RNA, 21 nt, Artificial Sequence
  LRRK2 RNA guide
ggcaccuagguacgugguucu

SEQ ID NO: 95381 - RNA, 21 nt, Artificial Sequence
  LRRK2 RNA guide
ggcugcuuaaaggcaccuagg

SEQ ID NO: 95382 - RNA, 21 nt, Artificial Sequence
  LRRK2 RNA guide
guaccuaggugccuuuaagca

SEQ ID NO: 95383 - RNA, 21 nt, Artificial Sequence
  LRRK2 RNA guide
uaaaggcaccuagguacgugg

SEQ ID NO: 95384 - RNA, 21 nt, Artificial Sequence
  LRRK2 RNA guide
uaccuaggugccuuuaagcag

SEQ ID NO: 95385 - RNA, 21 nt, Artificial Sequence
  LRRK2 RNA guide
uagaaagaaccacguaccuag

SEQ ID NO: 95386 - RNA, 21 nt, Artificial Sequence
  LRRK2 RNA guide
uagguacgugguucuuucuaa

SEQ ID NO: 95387 - RNA, 21 nt, Artificial Sequence
  LRRK2 RNA guide
ugcuuaaaggcaccuagguac

SEQ ID NO: 95388 - RNA, 21 nt, Artificial Sequence
  LRRK2 RNA guide
uggcugcuuaaaggcaccuag

SEQ ID NO: 95389 - RNA, 21 nt, Artificial Sequence
  LRRK2 RNA guide
uuaaaggcaccuagguacgug

SEQ ID NO: 95390 - RNA, 21 nt, Artificial Sequence
  LRRK2 RNA guide
uuagaaagaaccacguaccua

SEQ ID NO: 95391 - RNA, 22 nt, Artificial Sequence
  LRRK2 RNA guide
aaagaaccacguaccuaggugc

SEQ ID NO: 95392 - RNA, 22 nt, Artificial Sequence
  LRRK2 RNA guide
aaaggcaccuagguacgugguu

SEQ ID NO: 95393 - RNA, 22 nt, Artificial Sequence
  LRRK2 RNA guide
aaauuagaaagaaccacguacc

SEQ ID NO: 95394 - RNA, 22 nt, Artificial Sequence
  LRRK2 RNA guide
aaccacguaccuaggugccuuu

SEQ ID NO: 95395 - RNA, 22 nt, Artificial Sequence
  LRRK2 RNA guide
aagaaccacguaccuaggugcc

SEQ ID NO: 95396 - RNA, 22 nt, Artificial Sequence
  LRRK2 RNA guide
aaggcaccuagguacgugguuc

SEQ ID NO: 95397 - RNA, 22 nt, Artificial Sequence
  LRRK2 RNA guide
aauuagaaagaaccacguaccu

SEQ ID NO: 95398 - RNA, 22 nt, Artificial Sequence
  LRRK2 RNA guide
accacguaccuaggugccuuua

SEQ ID NO: 95399 - RNA, 22 nt, Artificial Sequence
  LRRK2 RNA guide
accuagguacgugguucuuucu

SEQ ID NO: 95400 - RNA, 22 nt, Artificial Sequence
  LRRK2 RNA guide
accuaggugccuuuaagcagcc

SEQ ID NO: 95401 - RNA, 22 nt, Artificial Sequence
  LRRK2 RNA guide
acguaccuaggugccuuuaagc

SEQ ID NO: 95402 - RNA, 22 nt, Artificial Sequence
  LRRK2 RNA guide
agaaagaaccacguaccuaggu

SEQ ID NO: 95403 - RNA, 22 nt, Artificial Sequence
  LRRK2 RNA guide
agaaccacguaccuaggugccu

SEQ ID NO: 95404 - RNA, 22 nt, Artificial Sequence
  LRRK2 RNA guide
aggcaccuagguacgugguucu

SEQ ID NO: 95405 - RNA, 22 nt, Artificial Sequence
  LRRK2 RNA guide
agguacgugguucuuucuaauu

SEQ ID NO: 95406 - RNA, 22 nt, Artificial Sequence
  LRRK2 RNA guide
auuagaaagaaccacguaccua

SEQ ID NO: 95407 - RNA, 22 nt, Artificial Sequence
  LRRK2 RNA guide
caccuagguacgugguucuuuc

SEQ ID NO: 95408 - RNA, 22 nt, Artificial Sequence
  LRRK2 RNA guide
cacguaccuaggugccuuuaag

SEQ ID NO: 95409 - RNA, 22 nt, Artificial Sequence
  LRRK2 RNA guide
ccacguaccuaggugccuuuaa

SEQ ID NO: 95410 - RNA, 22 nt, Artificial Sequence
  LRRK2 RNA guide
ccuagguacgugguucuuucua

SEQ ID NO: 95411 - RNA, 22 nt, Artificial Sequence
  LRRK2 RNA guide
ccuaggugccuuuaagcagcca

SEQ ID NO: 95412 - RNA, 22 nt, Artificial Sequence
  LRRK2 RNA guide
cguaccuaggugccuuuaagca

SEQ ID NO: 95413 - RNA, 22 nt, Artificial Sequence
  LRRK2 RNA guide
cuagguacgugguucuuucuaa

SEQ ID NO: 95414 - RNA, 22 nt, Artificial Sequence
  LRRK2 RNA guide
cugcuuaaaggcaccuagguac

SEQ ID NO: 95415 - RNA, 22 nt, Artificial Sequence
  LRRK2 RNA guide
cuggcugcuuaaaggcaccuag

SEQ ID NO: 95416 - RNA, 22 nt, Artificial Sequence
  LRRK2 RNA guide
cuuaaaggcaccuagguacgug

SEQ ID NO: 95417 - RNA, 22 nt, Artificial Sequence
  LRRK2 RNA guide
gaaagaaccacguaccuaggug

SEQ ID NO: 95418 - RNA, 22 nt, Artificial Sequence
  LRRK2 RNA guide
gaaccacguaccuaggugccuu

SEQ ID NO: 95419 - RNA, 22 nt, Artificial Sequence
  LRRK2 RNA guide
gcaccuagguacgugguucuuu

SEQ ID NO: 95420 - RNA, 22 nt, Artificial Sequence
  LRRK2 RNA guide
gcugcuuaaaggcaccuaggua

SEQ ID NO: 95421 - RNA, 22 nt, Artificial Sequence
  LRRK2 RNA guide
gcuuaaaggcaccuagguacgu

SEQ ID NO: 95422 - RNA, 22 nt, Artificial Sequence
  LRRK2 RNA guide
ggcaccuagguacgugguucuu

SEQ ID NO: 95423 - RNA, 22 nt, Artificial Sequence
  LRRK2 RNA guide
ggcugcuuaaaggcaccuaggu

SEQ ID NO: 95424 - RNA, 22 nt, Artificial Sequence
  LRRK2 RNA guide
guaccuaggugccuuuaagcag

SEQ ID NO: 95425 - RNA, 22 nt, Artificial Sequence
  LRRK2 RNA guide
uaaaggcaccuagguacguggu

SEQ ID NO: 95426 - RNA, 22 nt, Artificial Sequence
  LRRK2 RNA guide
uaccuaggugccuuuaagcagc

SEQ ID NO: 95427 - RNA, 22 nt, Artificial Sequence
  LRRK2 RNA guide
uagaaagaaccacguaccuagg

SEQ ID NO: 95428 - RNA, 22 nt, Artificial Sequence
  LRRK2 RNA guide
uagguacgugguucuuucuaau

SEQ ID NO: 95429 - RNA, 22 nt, Artificial Sequence
  LRRK2 RNA guide
ugcuuaaaggcaccuagguacg

SEQ ID NO: 95430 - RNA, 22 nt, Artificial Sequence
  LRRK2 RNA guide
uggcugcuuaaaggcaccuagg

SEQ ID NO: 95431 - RNA, 22 nt, Artificial Sequence
  LRRK2 RNA guide
uuaaaggcaccuagguacgugg

SEQ ID NO: 95432 - RNA, 22 nt, Artificial Sequence
  LRRK2 RNA guide
uuagaaagaaccacguaccuag

SEQ ID NO: 95433 - RNA, 20 nt, Artificial Sequence
  LRRK2 RNA guide
aaaaugcuauauccauacac

SEQ ID NO: 95434 - RNA, 20 nt, Artificial Sequence
  LRRK2 RNA guide
aaaugcuauauccauacaca

SEQ ID NO: 95435 - RNA, 20 nt, Artificial Sequence
  LRRK2 RNA guide
aaugcuauauccauacacaa

SEQ ID NO: 95436 - RNA, 20 nt, Artificial Sequence
  LRRK2 RNA guide
augcuauauccauacacaaa

SEQ ID NO: 95437 - RNA, 20 nt, Artificial Sequence
  LRRK2 RNA guide
auuuguguauggauauagca

SEQ ID NO: 95438 - RNA, 20 nt, Artificial Sequence
  LRRK2 RNA guide
gaagaugcaagagaaauaua

SEQ ID NO: 95439 - RNA, 20 nt, Artificial Sequence
  LRRK2 RNA guide
gcuauauccauacacaaaua

SEQ ID NO: 95440 - RNA, 20 nt, Artificial Sequence
  LRRK2 RNA guide
uauuuguguauggauauagc

SEQ ID NO: 95441 - RNA, 20 nt, Artificial Sequence
  LRRK2 RNA guide
ugcuauauccauacacaaau

SEQ ID NO: 95442 - RNA, 20 nt, Artificial Sequence
  LRRK2 RNA guide
uuguguauggauauagcauu

SEQ ID NO: 95443 - RNA, 20 nt, Artificial Sequence
  LRRK2 RNA guide
uuuguguauggauauagcau

SEQ ID NO: 95444 - RNA, 22 nt, Artificial Sequence
  LRRK2 RNA guide
cugaagaugcaagagaaauaua

SEQ ID NO: 95445 - RNA, 20 nt, Artificial Sequence
  LRRK2 RNA guide
aaaugcuauauccauacacc

SEQ ID NO: 95446 - RNA, 20 nt, Artificial Sequence
  LRRK2 RNA guide
aaugcuauauccauacacca

SEQ ID NO: 95447 - RNA, 20 nt, Artificial Sequence
  LRRK2 RNA guide
auauugguguauggauauag

SEQ ID NO: 95448 - RNA, 20 nt, Artificial Sequence
  LRRK2 RNA guide
augcuauauccauacaccaa

SEQ ID NO: 95449 - RNA, 20 nt, Artificial Sequence
  LRRK2 RNA guide
auugguguauggauauagca

SEQ ID NO: 95450 - RNA, 20 nt, Artificial Sequence
  LRRK2 RNA guide
ccaauauauauuucucuugc

SEQ ID NO: 95451 - RNA, 20 nt, Artificial Sequence
  LRRK2 RNA guide
cuauauccauacaccaauau

SEQ ID NO: 95452 - RNA, 20 nt, Artificial Sequence
  LRRK2 RNA guide
gcaagagaaauauauauugg

SEQ ID NO: 95453 - RNA, 20 nt, Artificial Sequence
  LRRK2 RNA guide
gcuauauccauacaccaaua

SEQ ID NO: 95454 - RNA, 20 nt, Artificial Sequence
  LRRK2 RNA guide
uauugguguauggauauagc

SEQ ID NO: 95455 - RNA, 20 nt, Artificial Sequence
  LRRK2 RNA guide
ugcuauauccauacaccaau

SEQ ID NO: 95456 - RNA, 20 nt, Artificial Sequence
  LRRK2 RNA guide
ugguguauggauauagcauu

SEQ ID NO: 95457 - RNA, 20 nt, Artificial Sequence
  LRRK2 RNA guide
uugguguauggauauagcau

SEQ ID NO: 95458 - RNA, 21 nt, Artificial Sequence
  LRRK2 RNA guide
aaaaugcuauauccauacacc

SEQ ID NO: 95459 - RNA, 21 nt, Artificial Sequence
  LRRK2 RNA guide
aaaugcuauauccauacacca

SEQ ID NO: 95460 - RNA, 21 nt, Artificial Sequence
  LRRK2 RNA guide
aaugcuauauccauacaccaa

SEQ ID NO: 95461 - RNA, 21 nt, Artificial Sequence
  LRRK2 RNA guide
auauugguguauggauauagc

SEQ ID NO: 95462 - RNA, 21 nt, Artificial Sequence
  LRRK2 RNA guide
augcuauauccauacaccaau

SEQ ID NO: 95463 - RNA, 21 nt, Artificial Sequence
  LRRK2 RNA guide
auugguguauggauauagcau

SEQ ID NO: 95464 - RNA, 21 nt, Artificial Sequence
  LRRK2 RNA guide
gcuauauccauacaccaauau

SEQ ID NO: 95465 - RNA, 21 nt, Artificial Sequence
  LRRK2 RNA guide
uauugguguauggauauagca

SEQ ID NO: 95466 - RNA, 21 nt, Artificial Sequence
  LRRK2 RNA guide
ugcuauauccauacaccaaua

SEQ ID NO: 95467 - RNA, 21 nt, Artificial Sequence
  LRRK2 RNA guide
ugguguauggauauagcauuu

SEQ ID NO: 95468 - RNA, 21 nt, Artificial Sequence
  LRRK2 RNA guide
uugguguauggauauagcauu

SEQ ID NO: 95469 - RNA, 22 nt, Artificial Sequence
  LRRK2 RNA guide
aaaaugcuauauccauacacca

SEQ ID NO: 95470 - RNA, 22 nt, Artificial Sequence
  LRRK2 RNA guide
aaaugcuauauccauacaccaa

SEQ ID NO: 95471 - RNA, 22 nt, Artificial Sequence
  LRRK2 RNA guide
aaugcuauauccauacaccaau

SEQ ID NO: 95472 - RNA, 22 nt, Artificial Sequence
  LRRK2 RNA guide
auauugguguauggauauagca

SEQ ID NO: 95473 - RNA, 22 nt, Artificial Sequence
  LRRK2 RNA guide
augcuauauccauacaccaaua

SEQ ID NO: 95474 - RNA, 22 nt, Artificial Sequence
  LRRK2 RNA guide
auugguguauggauauagcauu

SEQ ID NO: 95475 - RNA, 22 nt, Artificial Sequence
  LRRK2 RNA guide
caccaauauauauuucucuugc

SEQ ID NO: 95476 - RNA, 22 nt, Artificial Sequence
  LRRK2 RNA guide
gcaagagaaauauauauuggug

SEQ ID NO: 95477 - RNA, 22 nt, Artificial Sequence
  LRRK2 RNA guide
gcuauauccauacaccaauaua

SEQ ID NO: 95478 - RNA, 22 nt, Artificial Sequence
  LRRK2 RNA guide
uaaaaugcuauauccauacacc

SEQ ID NO: 95479 - RNA, 22 nt, Artificial Sequence
  LRRK2 RNA guide
uauauugguguauggauauagc

SEQ ID NO: 95480 - RNA, 22 nt, Artificial Sequence
  LRRK2 RNA guide
uauugguguauggauauagcau

SEQ ID NO: 95481 - RNA, 22 nt, Artificial Sequence
  LRRK2 RNA guide
ugcuauauccauacaccaauau

SEQ ID NO: 95482 - RNA, 22 nt, Artificial Sequence
  LRRK2 RNA guide
ugguguauggauauagcauuuu

SEQ ID NO: 95483 - RNA, 22 nt, Artificial Sequence
  LRRK2 RNA guide
uugguguauggauauagcauuu

SEQ ID NO: 95484 - RNA, 20 nt, Artificial Sequence
  LRRK2 RNA guide
accugcauucacuuuagaaa

SEQ ID NO: 95485 - RNA, 20 nt, Artificial Sequence
  LRRK2 RNA guide
cauucacuuuagaaaacaga

SEQ ID NO: 95486 - RNA, 20 nt, Artificial Sequence
  LRRK2 RNA guide
ccugcauucacuuuagaaaa

SEQ ID NO: 95487 - RNA, 20 nt, Artificial Sequence
  LRRK2 RNA guide
cugcauucacuuuagaaaac

SEQ ID NO: 95488 - RNA, 20 nt, Artificial Sequence
  LRRK2 RNA guide
gcauucacuuuagaaaacag

SEQ ID NO: 95489 - RNA, 20 nt, Artificial Sequence
  LRRK2 RNA guide
uaccugcauucacuuuagaa

SEQ ID NO: 95490 - RNA, 20 nt, Artificial Sequence
  LRRK2 RNA guide
ucuguuuucuaaagugaaug

SEQ ID NO: 95491 - RNA, 20 nt, Artificial Sequence
  LRRK2 RNA guide
ugcauucacuuuagaaaaca

SEQ ID NO: 95492 - RNA, 21 nt, Artificial Sequence
  LRRK2 RNA guide
accugcauucacuuuagaaaa

SEQ ID NO: 95493 - RNA, 21 nt, Artificial Sequence
  LRRK2 RNA guide
ccugcauucacuuuagaaaac

SEQ ID NO: 95494 - RNA, 21 nt, Artificial Sequence
  LRRK2 RNA guide
cugcauucacuuuagaaaaca

SEQ ID NO: 95495 - RNA, 21 nt, Artificial Sequence
  LRRK2 RNA guide
gcauucacuuuagaaaacaga

SEQ ID NO: 95496 - RNA, 21 nt, Artificial Sequence
  LRRK2 RNA guide
uaccugcauucacuuuagaaa

SEQ ID NO: 95497 - RNA, 21 nt, Artificial Sequence
  LRRK2 RNA guide
ucuguuuucuaaagugaaugc

SEQ ID NO: 95498 - RNA, 21 nt, Artificial Sequence
  LRRK2 RNA guide
ugcauucacuuuagaaaacag

SEQ ID NO: 95499 - RNA, 21 nt, Artificial Sequence
  LRRK2 RNA guide
uuaccugcauucacuuuagaa

SEQ ID NO: 95500 - RNA, 22 nt, Artificial Sequence
  LRRK2 RNA guide
accugcauucacuuuagaaaac

SEQ ID NO: 95501 - RNA, 22 nt, Artificial Sequence
  LRRK2 RNA guide
auuaccugcauucacuuuagaa

SEQ ID NO: 95502 - RNA, 22 nt, Artificial Sequence
  LRRK2 RNA guide
ccugcauucacuuuagaaaaca

SEQ ID NO: 95503 - RNA, 22 nt, Artificial Sequence
  LRRK2 RNA guide
cugcauucacuuuagaaaacag

SEQ ID NO: 95504 - RNA, 22 nt, Artificial Sequence
  LRRK2 RNA guide
gcauucacuuuagaaaacagaa

SEQ ID NO: 95505 - RNA, 22 nt, Artificial Sequence
  LRRK2 RNA guide
uaccugcauucacuuuagaaaa

SEQ ID NO: 95506 - RNA, 22 nt, Artificial Sequence
  LRRK2 RNA guide
ucuguuuucuaaagugaaugca

SEQ ID NO: 95507 - RNA, 22 nt, Artificial Sequence
  LRRK2 RNA guide
ugcauucacuuuagaaaacaga

SEQ ID NO: 95508 - RNA, 22 nt, Artificial Sequence
  LRRK2 RNA guide
uuaccugcauucacuuuagaaa

SEQ ID NO: 95509 - RNA, 22 nt, Artificial Sequence
  LRRK2 RNA guide
uucuguuuucuaaagugaaugc

SEQ ID NO: 95510 - RNA, 20 nt, Artificial Sequence
  LRRK2 RNA guide
cuuuugcaacuguuucuguu

SEQ ID NO: 95511 - RNA, 20 nt, Artificial Sequence
  LRRK2 RNA guide
ugcaacuguuucuguuuuuu

SEQ ID NO: 95512 - RNA, 20 nt, Artificial Sequence
  LRRK2 RNA guide
uugcaacuguuucuguuuuu

SEQ ID NO: 95513 - RNA, 20 nt, Artificial Sequence
  LRRK2 RNA guide
uuugcaacuguuucuguuuu

SEQ ID NO: 95514 - RNA, 20 nt, Artificial Sequence
  LRRK2 RNA guide
uuuugcaacuguuucuguuu

SEQ ID NO: 95515 - RNA, 21 nt, Artificial Sequence
  LRRK2 RNA guide
cuuuugcaacuguuucuguuu

SEQ ID NO: 95516 - RNA, 21 nt, Artificial Sequence
  LRRK2 RNA guide
ucuuuugcaacuguuucuguu

SEQ ID NO: 95517 - RNA, 22 nt, Artificial Sequence
  LRRK2 RNA guide
cuuuugcaacuguuucuguuuu

SEQ ID NO: 95518 - RNA, 22 nt, Artificial Sequence
  LRRK2 RNA guide
ucuuuugcaacuguuucuguuu

SEQ ID NO: 95519 - RNA, 22 nt, Artificial Sequence
  LRRK2 RNA guide
uucuuuugcaacuguuucuguu

SEQ ID NO: 95520 - RNA, 20 nt, Artificial Sequence
  LRRK2 RNA guide
acaaaaaacagaaacaguug

SEQ ID NO: 95521 - RNA, 20 nt, Artificial Sequence
  LRRK2 RNA guide
caacuguuucuguuuuuugu

SEQ ID NO: 95522 - RNA, 20 nt, Artificial Sequence
  LRRK2 RNA guide
gcaacuguuucuguuuuuug

SEQ ID NO: 95523 - RNA, 21 nt, Artificial Sequence
  LRRK2 RNA guide
acaaaaaacagaaacaguugc

SEQ ID NO: 95524 - RNA, 21 nt, Artificial Sequence
  LRRK2 RNA guide
gcaacuguuucuguuuuuugu

SEQ ID NO: 95525 - RNA, 21 nt, Artificial Sequence
  LRRK2 RNA guide
ugcaacuguuucuguuuuuug

SEQ ID NO: 95526 - RNA, 22 nt, Artificial Sequence
  LRRK2 RNA guide
aacaaaaaacagaaacaguugc

SEQ ID NO: 95527 - RNA, 22 nt, Artificial Sequence
  LRRK2 RNA guide
acaaaaaacagaaacaguugca

SEQ ID NO: 95528 - RNA, 22 nt, Artificial Sequence
  LRRK2 RNA guide
gcaacuguuucuguuuuuuguu

SEQ ID NO: 95529 - RNA, 22 nt, Artificial Sequence
  LRRK2 RNA guide
ugcaacuguuucuguuuuuugu

SEQ ID NO: 95530 - RNA, 22 nt, Artificial Sequence
  LRRK2 RNA guide
uugcaacuguuucuguuuuuug

SEQ ID NO: 95531 - RNA, 20 nt, Artificial Sequence
  LRRK2 RNA guide
aaagcacacauuacuauaca

SEQ ID NO: 95532 - RNA, 20 nt, Artificial Sequence
  LRRK2 RNA guide
aaauguauaguaaugugugc

SEQ ID NO: 95533 - RNA, 20 nt, Artificial Sequence
  LRRK2 RNA guide
aacuuccaaagauccaaaau

SEQ ID NO: 95534 - RNA, 20 nt, Artificial Sequence
  LRRK2 RNA guide
aagcacacauuacuauacau

SEQ ID NO: 95535 - RNA, 20 nt, Artificial Sequence
  LRRK2 RNA guide
aauguauaguaaugugugcu

SEQ ID NO: 95536 - RNA, 20 nt, Artificial Sequence
  LRRK2 RNA guide
acauuuuggaucuuuggaag

SEQ ID NO: 95537 - RNA, 20 nt, Artificial Sequence
  LRRK2 RNA guide
acuuccaaagauccaaaaug

SEQ ID NO: 95538 - RNA, 20 nt, Artificial Sequence
  LRRK2 RNA guide
agcaacuuccaaagauccaa

SEQ ID NO: 95539 - RNA, 20 nt, Artificial Sequence
  LRRK2 RNA guide
agcacacauuacuauacauu

SEQ ID NO: 95540 - RNA, 20 nt, Artificial Sequence
  LRRK2 RNA guide
auacauuuuggaucuuugga

SEQ ID NO: 95541 - RNA, 20 nt, Artificial Sequence
  LRRK2 RNA guide
auguauaguaaugugugcuu

SEQ ID NO: 95542 - RNA, 20 nt, Artificial Sequence
  LRRK2 RNA guide
caaagauccaaaauguauag

SEQ ID NO: 95543 - RNA, 20 nt, Artificial Sequence
  LRRK2 RNA guide
caacuuccaaagauccaaaa

SEQ ID NO: 95544 - RNA, 20 nt, Artificial Sequence
  LRRK2 RNA guide
cacauuacuauacauuuugg

SEQ ID NO: 95545 - RNA, 20 nt, Artificial Sequence
  LRRK2 RNA guide
cauuuuggaucuuuggaagu

SEQ ID NO: 95546 - RNA, 20 nt, Artificial Sequence
  LRRK2 RNA guide
ccaaaauguauaguaaugug

SEQ ID NO: 95547 - RNA, 20 nt, Artificial Sequence
  LRRK2 RNA guide
ccaaagauccaaaauguaua

SEQ ID NO: 95548 - RNA, 20 nt, Artificial Sequence
  LRRK2 RNA guide
cuaauaaagcacacauuacu

SEQ ID NO: 95549 - RNA, 20 nt, Artificial Sequence
  LRRK2 RNA guide
cuauacauuuuggaucuuug

SEQ ID NO: 95550 - RNA, 20 nt, Artificial Sequence
  LRRK2 RNA guide
cuuccaaagauccaaaaugu

SEQ ID NO: 95551 - RNA, 20 nt, Artificial Sequence
  LRRK2 RNA guide
gagcaacuuccaaagaucca

SEQ ID NO: 95552 - RNA, 20 nt, Artificial Sequence
  LRRK2 RNA guide
gcaacuuccaaagauccaaa

SEQ ID NO: 95553 - RNA, 20 nt, Artificial Sequence
  LRRK2 RNA guide
gcacacauuacuauacauuu

SEQ ID NO: 95554 - RNA, 20 nt, Artificial Sequence
  LRRK2 RNA guide
ggagcaacuuccaaagaucc

SEQ ID NO: 95555 - RNA, 20 nt, Artificial Sequence
  LRRK2 RNA guide
uaaagcacacauuacuauac

SEQ ID NO: 95556 - RNA, 20 nt, Artificial Sequence
  LRRK2 RNA guide
uacauuuuggaucuuuggaa

SEQ ID NO: 95557 - RNA, 20 nt, Artificial Sequence
  LRRK2 RNA guide
uauacauuuuggaucuuugg

SEQ ID NO: 95558 - RNA, 20 nt, Artificial Sequence
  LRRK2 RNA guide
uccaaagauccaaaauguau

SEQ ID NO: 95559 - RNA, 20 nt, Artificial Sequence
  LRRK2 RNA guide
uuccaaagauccaaaaugua

SEQ ID NO: 95560 - RNA, 21 nt, Artificial Sequence
  LRRK2 RNA guide
aacuuccaaagauccaaaaug

SEQ ID NO: 95561 - RNA, 21 nt, Artificial Sequence
  LRRK2 RNA guide
acauuuuggaucuuuggaagu

SEQ ID NO: 95562 - RNA, 21 nt, Artificial Sequence
  LRRK2 RNA guide
acuuccaaagauccaaaaugu

SEQ ID NO: 95563 - RNA, 21 nt, Artificial Sequence
  LRRK2 RNA guide
agcaacuuccaaagauccaaa

SEQ ID NO: 95564 - RNA, 21 nt, Artificial Sequence
  LRRK2 RNA guide
aggagcaacuuccaaagaucc

SEQ ID NO: 95565 - RNA, 21 nt, Artificial Sequence
  LRRK2 RNA guide
caacuuccaaagauccaaaau

SEQ ID NO: 95566 - RNA, 21 nt, Artificial Sequence
  LRRK2 RNA guide
cauuuuggaucuuuggaaguu

SEQ ID NO: 95567 - RNA, 21 nt, Artificial Sequence
  LRRK2 RNA guide
ccaaagauccaaaauguauag

SEQ ID NO: 95568 - RNA, 21 nt, Artificial Sequence
  LRRK2 RNA guide
cuauacauuuuggaucuuugg

SEQ ID NO: 95569 - RNA, 21 nt, Artificial Sequence
  LRRK2 RNA guide
cuuccaaagauccaaaaugua

SEQ ID NO: 95570 - RNA, 21 nt, Artificial Sequence
  LRRK2 RNA guide
gagcaacuuccaaagauccaa

SEQ ID NO: 95571 - RNA, 21 nt, Artificial Sequence
  LRRK2 RNA guide
gcaacuuccaaagauccaaaa

SEQ ID NO: 95572 - RNA, 21 nt, Artificial Sequence
  LRRK2 RNA guide
ggagcaacuuccaaagaucca

SEQ ID NO: 95573 - RNA, 21 nt, Artificial Sequence
  LRRK2 RNA guide
uacauuuuggaucuuuggaag

SEQ ID NO: 95574 - RNA, 22 nt, Artificial Sequence
  LRRK2 RNA guide
aacuuccaaagauccaaaaugu

SEQ ID NO: 95575 - RNA, 22 nt, Artificial Sequence
  LRRK2 RNA guide
acauuuuggaucuuuggaaguu

SEQ ID NO: 95576 - RNA, 22 nt, Artificial Sequence
  LRRK2 RNA guide
acuauacauuuuggaucuuugg

SEQ ID NO: 95577 - RNA, 22 nt, Artificial Sequence
  LRRK2 RNA guide
acuuccaaagauccaaaaugua

SEQ ID NO: 95578 - RNA, 22 nt, Artificial Sequence
  LRRK2 RNA guide
agcaacuuccaaagauccaaaa

SEQ ID NO: 95579 - RNA, 22 nt, Artificial Sequence
  LRRK2 RNA guide
aggagcaacuuccaaagaucca

SEQ ID NO: 95580 - RNA, 22 nt, Artificial Sequence
  LRRK2 RNA guide
auacauuuuggaucuuuggaag

SEQ ID NO: 95581 - RNA, 22 nt, Artificial Sequence
  LRRK2 RNA guide
caaaauguauaguaaugugugc

SEQ ID NO: 95582 - RNA, 22 nt, Artificial Sequence
  LRRK2 RNA guide
caacuuccaaagauccaaaaug

SEQ ID NO: 95583 - RNA, 22 nt, Artificial Sequence
  LRRK2 RNA guide
cacacauuacuauacauuuugg

SEQ ID NO: 95584 - RNA, 22 nt, Artificial Sequence
  LRRK2 RNA guide
caggagcaacuuccaaagaucc

SEQ ID NO: 95585 - RNA, 22 nt, Artificial Sequence
  LRRK2 RNA guide
cauuuuggaucuuuggaaguug

SEQ ID NO: 95586 - RNA, 22 nt, Artificial Sequence
  LRRK2 RNA guide
ccaaaauguauaguaaugugug

SEQ ID NO: 95587 - RNA, 22 nt, Artificial Sequence
  LRRK2 RNA guide
ccaaagauccaaaauguauagu

SEQ ID NO: 95588 - RNA, 22 nt, Artificial Sequence
  LRRK2 RNA guide
cuauacauuuuggaucuuugga

SEQ ID NO: 95589 - RNA, 22 nt, Artificial Sequence
  LRRK2 RNA guide
cucuaauaaagcacacauuacu

SEQ ID NO: 95590 - RNA, 22 nt, Artificial Sequence
  LRRK2 RNA guide
cuuccaaagauccaaaauguau

SEQ ID NO: 95591 - RNA, 22 nt, Artificial Sequence
  LRRK2 RNA guide
gagcaacuuccaaagauccaaa

SEQ ID NO: 95592 - RNA, 22 nt, Artificial Sequence
  LRRK2 RNA guide
gcaacuuccaaagauccaaaau

SEQ ID NO: 95593 - RNA, 22 nt, Artificial Sequence
  LRRK2 RNA guide
gcacacauuacuauacauuuug

SEQ ID NO: 95594 - RNA, 22 nt, Artificial Sequence
  LRRK2 RNA guide
ggagcaacuuccaaagauccaa

SEQ ID NO: 95595 - RNA, 22 nt, Artificial Sequence
  LRRK2 RNA guide
uacauuuuggaucuuuggaagu

SEQ ID NO: 95596 - RNA, 22 nt, Artificial Sequence
  LRRK2 RNA guide
uccaaagauccaaaauguauag

SEQ ID NO: 95597 - RNA, 20 nt, Artificial Sequence
  LRRK2 RNA guide
aaaacguauaguaaugugug

SEQ ID NO: 95598 - RNA, 20 nt, Artificial Sequence
  LRRK2 RNA guide
aaacguauaguaaugugugc

SEQ ID NO: 95599 - RNA, 20 nt, Artificial Sequence
  LRRK2 RNA guide
aaagauccaaaacguauagu

SEQ ID NO: 95600 - RNA, 20 nt, Artificial Sequence
  LRRK2 RNA guide
aaagcacacauuacuauacg

SEQ ID NO: 95601 - RNA, 20 nt, Artificial Sequence
  LRRK2 RNA guide
aacguauaguaaugugugcu

SEQ ID NO: 95602 - RNA, 20 nt, Artificial Sequence
  LRRK2 RNA guide
aacuuccaaagauccaaaac

SEQ ID NO: 95603 - RNA, 20 nt, Artificial Sequence
  LRRK2 RNA guide
aagauccaaaacguauagua

SEQ ID NO: 95604 - RNA, 20 nt, Artificial Sequence
  LRRK2 RNA guide
aagcacacauuacuauacgu

SEQ ID NO: 95605 - RNA, 20 nt, Artificial Sequence
  LRRK2 RNA guide
acacauuacuauacguuuug

SEQ ID NO: 95606 - RNA, 20 nt, Artificial Sequence
  LRRK2 RNA guide
acauuacuauacguuuugga

SEQ ID NO: 95607 - RNA, 20 nt, Artificial Sequence
  LRRK2 RNA guide
acguauaguaaugugugcuu

SEQ ID NO: 95608 - RNA, 20 nt, Artificial Sequence
  LRRK2 RNA guide
acguuuuggaucuuuggaag

SEQ ID NO: 95609 - RNA, 20 nt, Artificial Sequence
  LRRK2 RNA guide
acuauacguuuuggaucuuu

SEQ ID NO: 95610 - RNA, 20 nt, Artificial Sequence
  LRRK2 RNA guide
acuuccaaagauccaaaacg

SEQ ID NO: 95611 - RNA, 20 nt, Artificial Sequence
  LRRK2 RNA guide
agauccaaaacguauaguaa

SEQ ID NO: 95612 - RNA, 20 nt, Artificial Sequence
  LRRK2 RNA guide
agcacacauuacuauacguu

SEQ ID NO: 95613 - RNA, 20 nt, Artificial Sequence
  LRRK2 RNA guide
auacguuuuggaucuuugga

SEQ ID NO: 95614 - RNA, 20 nt, Artificial Sequence
  LRRK2 RNA guide
auccaaaacguauaguaaug

SEQ ID NO: 95615 - RNA, 20 nt, Artificial Sequence
  LRRK2 RNA guide
auuacuauacguuuuggauc

SEQ ID NO: 95616 - RNA, 20 nt, Artificial Sequence
  LRRK2 RNA guide
caaaacguauaguaaugugu

SEQ ID NO: 95617 - RNA, 20 nt, Artificial Sequence
  LRRK2 RNA guide
caaagauccaaaacguauag

SEQ ID NO: 95618 - RNA, 20 nt, Artificial Sequence
  LRRK2 RNA guide
cacacauuacuauacguuuu

SEQ ID NO: 95619 - RNA, 20 nt, Artificial Sequence
  LRRK2 RNA guide
cacauuacuauacguuuugg

SEQ ID NO: 95620 - RNA, 20 nt, Artificial Sequence
  LRRK2 RNA guide
cauuacuauacguuuuggau

SEQ ID NO: 95621 - RNA, 20 nt, Artificial Sequence
  LRRK2 RNA guide
ccaaaacguauaguaaugug

SEQ ID NO: 95622 - RNA, 20 nt, Artificial Sequence
  LRRK2 RNA guide
ccaaagauccaaaacguaua

SEQ ID NO: 95623 - RNA, 20 nt, Artificial Sequence
  LRRK2 RNA guide
cguuuuggaucuuuggaagu

SEQ ID NO: 95624 - RNA, 20 nt, Artificial Sequence
  LRRK2 RNA guide
cuauacguuuuggaucuuug

SEQ ID NO: 95625 - RNA, 20 nt, Artificial Sequence
  LRRK2 RNA guide
cuuccaaagauccaaaacgu

SEQ ID NO: 95626 - RNA, 20 nt, Artificial Sequence
  LRRK2 RNA guide
gauccaaaacguauaguaau

SEQ ID NO: 95627 - RNA, 20 nt, Artificial Sequence
  LRRK2 RNA guide
gcacacauuacuauacguuu

SEQ ID NO: 95628 - RNA, 20 nt, Artificial Sequence
  LRRK2 RNA guide
uacguuuuggaucuuuggaa

SEQ ID NO: 95629 - RNA, 20 nt, Artificial Sequence
  LRRK2 RNA guide
uacuauacguuuuggaucuu

SEQ ID NO: 95630 - RNA, 20 nt, Artificial Sequence
  LRRK2 RNA guide
uauacguuuuggaucuuugg

SEQ ID NO: 95631 - RNA, 20 nt, Artificial Sequence
  LRRK2 RNA guide
uccaaaacguauaguaaugu

SEQ ID NO: 95632 - RNA, 20 nt, Artificial Sequence
  LRRK2 RNA guide
uccaaagauccaaaacguau

SEQ ID NO: 95633 - RNA, 20 nt, Artificial Sequence
  LRRK2 RNA guide
uuacuauacguuuuggaucu

SEQ ID NO: 95634 - RNA, 20 nt, Artificial Sequence
  LRRK2 RNA guide
uuccaaagauccaaaacgua

SEQ ID NO: 95635 - RNA, 21 nt, Artificial Sequence
  LRRK2 RNA guide
aaaacguauaguaaugugugc

SEQ ID NO: 95636 - RNA, 21 nt, Artificial Sequence
  LRRK2 RNA guide
aaacguauaguaaugugugcu

SEQ ID NO: 95637 - RNA, 21 nt, Artificial Sequence
  LRRK2 RNA guide
aaagcacacauuacuauacgu

SEQ ID NO: 95638 - RNA, 21 nt, Artificial Sequence
  LRRK2 RNA guide
aacguauaguaaugugugcuu

SEQ ID NO: 95639 - RNA, 21 nt, Artificial Sequence
  LRRK2 RNA guide
aacuuccaaagauccaaaacg

SEQ ID NO: 95640 - RNA, 21 nt, Artificial Sequence
  LRRK2 RNA guide
aagcacacauuacuauacguu

SEQ ID NO: 95641 - RNA, 21 nt, Artificial Sequence
  LRRK2 RNA guide
acacauuacuauacguuuugg

SEQ ID NO: 95642 - RNA, 21 nt, Artificial Sequence
  LRRK2 RNA guide
acguauaguaaugugugcuuu

SEQ ID NO: 95643 - RNA, 21 nt, Artificial Sequence
  LRRK2 RNA guide
acguuuuggaucuuuggaagu

SEQ ID NO: 95644 - RNA, 21 nt, Artificial Sequence
  LRRK2 RNA guide
acuauacguuuuggaucuuug

SEQ ID NO: 95645 - RNA, 21 nt, Artificial Sequence
  LRRK2 RNA guide
acuuccaaagauccaaaacgu

SEQ ID NO: 95646 - RNA, 21 nt, Artificial Sequence
  LRRK2 RNA guide
agcacacauuacuauacguuu

SEQ ID NO: 95647 - RNA, 21 nt, Artificial Sequence
  LRRK2 RNA guide
auacguuuuggaucuuuggaa

SEQ ID NO: 95648 - RNA, 21 nt, Artificial Sequence
  LRRK2 RNA guide
caaaacguauaguaaugugug

SEQ ID NO: 95649 - RNA, 21 nt, Artificial Sequence
  LRRK2 RNA guide
caaagauccaaaacguauagu

SEQ ID NO: 95650 - RNA, 21 nt, Artificial Sequence
  LRRK2 RNA guide
caacuuccaaagauccaaaac

SEQ ID NO: 95651 - RNA, 21 nt, Artificial Sequence
  LRRK2 RNA guide
cacacauuacuauacguuuug

SEQ ID NO: 95652 - RNA, 21 nt, Artificial Sequence
  LRRK2 RNA guide
cacauuacuauacguuuugga

SEQ ID NO: 95653 - RNA, 21 nt, Artificial Sequence
  LRRK2 RNA guide
cauuacuauacguuuuggauc

SEQ ID NO: 95654 - RNA, 21 nt, Artificial Sequence
  LRRK2 RNA guide
ccaaaacguauaguaaugugu

SEQ ID NO: 95655 - RNA, 21 nt, Artificial Sequence
  LRRK2 RNA guide
ccaaagauccaaaacguauag

SEQ ID NO: 95656 - RNA, 21 nt, Artificial Sequence
  LRRK2 RNA guide
cguuuuggaucuuuggaaguu

SEQ ID NO: 95657 - RNA, 21 nt, Artificial Sequence
  LRRK2 RNA guide
cuauacguuuuggaucuuugg

SEQ ID NO: 95658 - RNA, 21 nt, Artificial Sequence
  LRRK2 RNA guide
cuuccaaagauccaaaacgua

SEQ ID NO: 95659 - RNA, 21 nt, Artificial Sequence
  LRRK2 RNA guide
gauccaaaacguauaguaaug

SEQ ID NO: 95660 - RNA, 21 nt, Artificial Sequence
  LRRK2 RNA guide
gcacacauuacuauacguuuu

SEQ ID NO: 95661 - RNA, 21 nt, Artificial Sequence
  LRRK2 RNA guide
uaaagcacacauuacuauacg

SEQ ID NO: 95662 - RNA, 21 nt, Artificial Sequence
  LRRK2 RNA guide
uacguuuuggaucuuuggaag

SEQ ID NO: 95663 - RNA, 21 nt, Artificial Sequence
  LRRK2 RNA guide
uauacguuuuggaucuuugga

SEQ ID NO: 95664 - RNA, 21 nt, Artificial Sequence
  LRRK2 RNA guide
uccaaaacguauaguaaugug

SEQ ID NO: 95665 - RNA, 21 nt, Artificial Sequence
  LRRK2 RNA guide
uccaaagauccaaaacguaua

SEQ ID NO: 95666 - RNA, 21 nt, Artificial Sequence
  LRRK2 RNA guide
uuccaaagauccaaaacguau

SEQ ID NO: 95667 - RNA, 22 nt, Artificial Sequence
  LRRK2 RNA guide
aaaacguauaguaaugugugcu

SEQ ID NO: 95668 - RNA, 22 nt, Artificial Sequence
  LRRK2 RNA guide
aaacguauaguaaugugugcuu

SEQ ID NO: 95669 - RNA, 22 nt, Artificial Sequence
  LRRK2 RNA guide
aaagcacacauuacuauacguu

SEQ ID NO: 95670 - RNA, 22 nt, Artificial Sequence
  LRRK2 RNA guide
aacguauaguaaugugugcuuu

SEQ ID NO: 95671 - RNA, 22 nt, Artificial Sequence
  LRRK2 RNA guide
aacuuccaaagauccaaaacgu

SEQ ID NO: 95672 - RNA, 22 nt, Artificial Sequence
  LRRK2 RNA guide
aagcacacauuacuauacguuu

SEQ ID NO: 95673 - RNA, 22 nt, Artificial Sequence
  LRRK2 RNA guide
acacauuacuauacguuuugga

SEQ ID NO: 95674 - RNA, 22 nt, Artificial Sequence
  LRRK2 RNA guide
acauuacuauacguuuuggauc

SEQ ID NO: 95675 - RNA, 22 nt, Artificial Sequence
  LRRK2 RNA guide
acguauaguaaugugugcuuua

SEQ ID NO: 95676 - RNA, 22 nt, Artificial Sequence
  LRRK2 RNA guide
acguuuuggaucuuuggaaguu

SEQ ID NO: 95677 - RNA, 22 nt, Artificial Sequence
  LRRK2 RNA guide
acuauacguuuuggaucuuugg

SEQ ID NO: 95678 - RNA, 22 nt, Artificial Sequence
  LRRK2 RNA guide
acuuccaaagauccaaaacgua

SEQ ID NO: 95679 - RNA, 22 nt, Artificial Sequence
  LRRK2 RNA guide
agauccaaaacguauaguaaug

SEQ ID NO: 95680 - RNA, 22 nt, Artificial Sequence
  LRRK2 RNA guide
agcacacauuacuauacguuuu

SEQ ID NO: 95681 - RNA, 22 nt, Artificial Sequence
  LRRK2 RNA guide
auaaagcacacauuacuauacg

SEQ ID NO: 95682 - RNA, 22 nt, Artificial Sequence
  LRRK2 RNA guide
auacguuuuggaucuuuggaag

SEQ ID NO: 95683 - RNA, 22 nt, Artificial Sequence
  LRRK2 RNA guide
auccaaaacguauaguaaugug

SEQ ID NO: 95684 - RNA, 22 nt, Artificial Sequence
  LRRK2 RNA guide
caaaacguauaguaaugugugc

SEQ ID NO: 95685 - RNA, 22 nt, Artificial Sequence
  LRRK2 RNA guide
caaagauccaaaacguauagua

SEQ ID NO: 95686 - RNA, 22 nt, Artificial Sequence
  LRRK2 RNA guide
caacuuccaaagauccaaaacg

SEQ ID NO: 95687 - RNA, 22 nt, Artificial Sequence
  LRRK2 RNA guide
cacacauuacuauacguuuugg

SEQ ID NO: 95688 - RNA, 22 nt, Artificial Sequence
  LRRK2 RNA guide
cacauuacuauacguuuuggau

SEQ ID NO: 95689 - RNA, 22 nt, Artificial Sequence
  LRRK2 RNA guide
cauuacuauacguuuuggaucu

SEQ ID NO: 95690 - RNA, 22 nt, Artificial Sequence
  LRRK2 RNA guide
ccaaaacguauaguaaugugug

SEQ ID NO: 95691 - RNA, 22 nt, Artificial Sequence
  LRRK2 RNA guide
ccaaagauccaaaacguauagu

SEQ ID NO: 95692 - RNA, 22 nt, Artificial Sequence
  LRRK2 RNA guide
cguuuuggaucuuuggaaguug

SEQ ID NO: 95693 - RNA, 22 nt, Artificial Sequence
  LRRK2 RNA guide
cuauacguuuuggaucuuugga

SEQ ID NO: 95694 - RNA, 22 nt, Artificial Sequence
  LRRK2 RNA guide
cuuccaaagauccaaaacguau

SEQ ID NO: 95695 - RNA, 22 nt, Artificial Sequence
  LRRK2 RNA guide
gauccaaaacguauaguaaugu

SEQ ID NO: 95696 - RNA, 22 nt, Artificial Sequence
  LRRK2 RNA guide
gcaacuuccaaagauccaaaac

SEQ ID NO: 95697 - RNA, 22 nt, Artificial Sequence
  LRRK2 RNA guide
gcacacauuacuauacguuuug

SEQ ID NO: 95698 - RNA, 22 nt, Artificial Sequence
  LRRK2 RNA guide
uaaagcacacauuacuauacgu

SEQ ID NO: 95699 - RNA, 22 nt, Artificial Sequence
  LRRK2 RNA guide
uacguuuuggaucuuuggaagu

SEQ ID NO: 95700 - RNA, 22 nt, Artificial Sequence
  LRRK2 RNA guide
uacuauacguuuuggaucuuug

SEQ ID NO: 95701 - RNA, 22 nt, Artificial Sequence
  LRRK2 RNA guide
uauacguuuuggaucuuuggaa

SEQ ID NO: 95702 - RNA, 22 nt, Artificial Sequence
  LRRK2 RNA guide
uccaaaacguauaguaaugugu

SEQ ID NO: 95703 - RNA, 22 nt, Artificial Sequence
  LRRK2 RNA guide
uccaaagauccaaaacguauag

SEQ ID NO: 95704 - RNA, 22 nt, Artificial Sequence
  LRRK2 RNA guide
uuccaaagauccaaaacguaua

SEQ ID NO: 95705 - RNA, 20 nt, Artificial Sequence
  LRRK2 RNA guide
aaaaaggugaagaccuuccu

SEQ ID NO: 95706 - RNA, 20 nt, Artificial Sequence
  LRRK2 RNA guide
aaaacagauagaaacgcugg

SEQ ID NO: 95707 - RNA, 20 nt, Artificial Sequence
  LRRK2 RNA guide
aaaaggugaagaccuuccug

SEQ ID NO: 95708 - RNA, 20 nt, Artificial Sequence
  LRRK2 RNA guide
aaaagucaaaaaggugaaga

SEQ ID NO: 95709 - RNA, 20 nt, Artificial Sequence
  LRRK2 RNA guide
aaaauuugcaaauguaagga

SEQ ID NO: 95710 - RNA, 20 nt, Artificial Sequence
  LRRK2 RNA guide
aaacagauagaaacgcuggu

SEQ ID NO: 95711 - RNA, 20 nt, Artificial Sequence
  LRRK2 RNA guide
aaacccggacucuuaaggag

SEQ ID NO: 95712 - RNA, 20 nt, Artificial Sequence
  LRRK2 RNA guide
aaacgcugguccaaauccug

SEQ ID NO: 95713 - RNA, 20 nt, Artificial Sequence
  LRRK2 RNA guide
aaacggggagaaaagucaaa

SEQ ID NO: 95714 - RNA, 20 nt, Artificial Sequence
  LRRK2 RNA guide
aaacucccauauccuuuccu

SEQ ID NO: 95715 - RNA, 20 nt, Artificial Sequence
  LRRK2 RNA guide
aaacucugaagaaguugaua

SEQ ID NO: 95716 - RNA, 20 nt, Artificial Sequence
  LRRK2 RNA guide
aaacuuucucccccuccuua

SEQ ID NO: 95717 - RNA, 20 nt, Artificial Sequence
  LRRK2 RNA guide
aaagcagcugagaauuucag

SEQ ID NO: 95718 - RNA, 20 nt, Artificial Sequence
  LRRK2 RNA guide
aaaggauaugggaguuugcg

SEQ ID NO: 95719 - RNA, 20 nt, Artificial Sequence
  LRRK2 RNA guide
aaaggugaagaccuuccuga

SEQ ID NO: 95720 - RNA, 20 nt, Artificial Sequence
  LRRK2 RNA guide
aaagucaaaaaggugaagac

SEQ ID NO: 95721 - RNA, 20 nt, Artificial Sequence
  LRRK2 RNA guide
aaauccuggaggaucugcug

SEQ ID NO: 95722 - RNA, 20 nt, Artificial Sequence
  LRRK2 RNA guide
aaauguaaggagggggagaa

SEQ ID NO: 95723 - RNA, 20 nt, Artificial Sequence
  LRRK2 RNA guide
aaauucucagcugcuuucug

SEQ ID NO: 95724 - RNA, 20 nt, Artificial Sequence
  LRRK2 RNA guide
aaauuugcaaauguaaggag

SEQ ID NO: 95725 - RNA, 20 nt, Artificial Sequence
  LRRK2 RNA guide
aaauuuuguccuccuccccu

SEQ ID NO: 95726 - RNA, 20 nt, Artificial Sequence
  LRRK2 RNA guide
aacaauguccaggaaggaaa

SEQ ID NO: 95727 - RNA, 20 nt, Artificial Sequence
  LRRK2 RNA guide
aacaccagcagauccuccag

SEQ ID NO: 95728 - RNA, 20 nt, Artificial Sequence
  LRRK2 RNA guide
aacagauagaaacgcugguc

SEQ ID NO: 95729 - RNA, 20 nt, Artificial Sequence
  LRRK2 RNA guide
aacccgccgcccucccagca

SEQ ID NO: 95730 - RNA, 20 nt, Artificial Sequence
  LRRK2 RNA guide
aacccggacucuuaaggagc

SEQ ID NO: 95731 - RNA, 20 nt, Artificial Sequence
  LRRK2 RNA guide
aaccggcaggggcgccggcc

SEQ ID NO: 95732 - RNA, 20 nt, Artificial Sequence
  LRRK2 RNA guide
aacgcugguccaaauccugg

SEQ ID NO: 95733 - RNA, 20 nt, Artificial Sequence
  LRRK2 RNA guide
aacggggagaaaagucaaaa

SEQ ID NO: 95734 - RNA, 20 nt, Artificial Sequence
  LRRK2 RNA guide
aacguccgcugcucagggaa

SEQ ID NO: 95735 - RNA, 20 nt, Artificial Sequence
  LRRK2 RNA guide
aacucccauauccuuuccuu

SEQ ID NO: 95736 - RNA, 20 nt, Artificial Sequence
  LRRK2 RNA guide
aacucugaagaaguugauag

SEQ ID NO: 95737 - RNA, 20 nt, Artificial Sequence
  LRRK2 RNA guide
aacuucuucagaguuuccuc

SEQ ID NO: 95738 - RNA, 20 nt, Artificial Sequence
  LRRK2 RNA guide
aacuuucucccccuccuuac

SEQ ID NO: 95739 - RNA, 20 nt, Artificial Sequence
  LRRK2 RNA guide
aagaaguugauagucaggcu

SEQ ID NO: 95740 - RNA, 20 nt, Artificial Sequence
  LRRK2 RNA guide
aagaccuuccugaaauucuc

SEQ ID NO: 95741 - RNA, 20 nt, Artificial Sequence
  LRRK2 RNA guide
aagaggacgaggaaacucug

SEQ ID NO: 95742 - RNA, 20 nt, Artificial Sequence
  LRRK2 RNA guide
aagaguccggguuugagcag

SEQ ID NO: 95743 - RNA, 20 nt, Artificial Sequence
  LRRK2 RNA guide
aagcagcugagaauuucagg

SEQ ID NO: 95744 - RNA, 20 nt, Artificial Sequence
  LRRK2 RNA guide
aagcaggugccaccauggcu

SEQ ID NO: 95745 - RNA, 20 nt, Artificial Sequence
  LRRK2 RNA guide
aaggaaaacagauagaaacg

SEQ ID NO: 95746 - RNA, 20 nt, Artificial Sequence
  LRRK2 RNA guide
aaggaaaggauaugggaguu

SEQ ID NO: 95747 - RNA, 20 nt, Artificial Sequence
  LRRK2 RNA guide
aaggagccgcaaacucccau

SEQ ID NO: 95748 - RNA, 20 nt, Artificial Sequence
  LRRK2 RNA guide
aaggagggggagaaaguuug

SEQ ID NO: 95749 - RNA, 20 nt, Artificial Sequence
  LRRK2 RNA guide
aaggauaugggaguuugcgg

SEQ ID NO: 95750 - RNA, 20 nt, Artificial Sequence
  LRRK2 RNA guide
aaggggaggaggacaaaauu

SEQ ID NO: 95751 - RNA, 20 nt, Artificial Sequence
  LRRK2 RNA guide
aaggucuucaccuuuuugac

SEQ ID NO: 95752 - RNA, 20 nt, Artificial Sequence
  LRRK2 RNA guide
aaggugaagaccuuccugaa

SEQ ID NO: 95753 - RNA, 20 nt, Artificial Sequence
  LRRK2 RNA guide
aagucaaaaaggugaagacc

SEQ ID NO: 95754 - RNA, 20 nt, Artificial Sequence
  LRRK2 RNA guide
aagugauuaccgcgcucgga

SEQ ID NO: 95755 - RNA, 20 nt, Artificial Sequence
  LRRK2 RNA guide
aaguugauagucaggcugaa

SEQ ID NO: 95756 - RNA, 20 nt, Artificial Sequence
  LRRK2 RNA guide
aauccuggaggaucugcugg

SEQ ID NO: 95757 - RNA, 20 nt, Artificial Sequence
  LRRK2 RNA guide
aauguaaggagggggagaaa

SEQ ID NO: 95758 - RNA, 20 nt, Artificial Sequence
  LRRK2 RNA guide
aauguccaggaaggaaaaca

SEQ ID NO: 95759 - RNA, 20 nt, Artificial Sequence
  LRRK2 RNA guide
aauucucagcugcuuucugc

SEQ ID NO: 95760 - RNA, 20 nt, Artificial Sequence
  LRRK2 RNA guide
aauuucaggaaggucuucac

SEQ ID NO: 95761 - RNA, 20 nt, Artificial Sequence
  LRRK2 RNA guide
aauuugcaaauguaaggagg

SEQ ID NO: 95762 - RNA, 20 nt, Artificial Sequence
  LRRK2 RNA guide
aauuuuguccuccuccccuu

SEQ ID NO: 95763 - RNA, 20 nt, Artificial Sequence
  LRRK2 RNA guide
acaaaauuugcaaauguaag

SEQ ID NO: 95764 - RNA, 20 nt, Artificial Sequence
  LRRK2 RNA guide
acaauguccaggaaggaaaa

SEQ ID NO: 95765 - RNA, 20 nt, Artificial Sequence
  LRRK2 RNA guide
acaccagcagauccuccagg

SEQ ID NO: 95766 - RNA, 20 nt, Artificial Sequence
  LRRK2 RNA guide
acagauagaaacgcuggucc

SEQ ID NO: 95767 - RNA, 20 nt, Artificial Sequence
  LRRK2 RNA guide
acagcuccccgggggcgagc

SEQ ID NO: 95768 - RNA, 20 nt, Artificial Sequence
  LRRK2 RNA guide
acagcugccacuagccaugg

SEQ ID NO: 95769 - RNA, 20 nt, Artificial Sequence
  LRRK2 RNA guide
acaguuuauuuucaagugau

SEQ ID NO: 95770 - RNA, 20 nt, Artificial Sequence
  LRRK2 RNA guide
acauuguucagccugacuau

SEQ ID NO: 95771 - RNA, 20 nt, Artificial Sequence
  LRRK2 RNA guide
acauuugcaaauuuuguccu

SEQ ID NO: 95772 - RNA, 20 nt, Artificial Sequence
  LRRK2 RNA guide
accagcagauccuccaggau

SEQ ID NO: 95773 - RNA, 20 nt, Artificial Sequence
  LRRK2 RNA guide
accagcguuucuaucuguuu

SEQ ID NO: 95774 - RNA, 20 nt, Artificial Sequence
  LRRK2 RNA guide
accauggcuaguggcagcug

SEQ ID NO: 95775 - RNA, 20 nt, Artificial Sequence
  LRRK2 RNA guide
acccgccgcccucccagcau

SEQ ID NO: 95776 - RNA, 20 nt, Artificial Sequence
  LRRK2 RNA guide
acccggacucuuaaggagcc

SEQ ID NO: 95777 - RNA, 20 nt, Artificial Sequence
  LRRK2 RNA guide
acccugcucaaacccggacu

SEQ ID NO: 95778 - RNA, 20 nt, Artificial Sequence
  LRRK2 RNA guide
accgcgcucggaguacguga

SEQ ID NO: 95779 - RNA, 20 nt, Artificial Sequence
  LRRK2 RNA guide
accggcaggggcgccggcca

SEQ ID NO: 95780 - RNA, 20 nt, Artificial Sequence
  LRRK2 RNA guide
accugcuuccaacccgccgc

SEQ ID NO: 95781 - RNA, 20 nt, Artificial Sequence
  LRRK2 RNA guide
accuuccugaaauucucagc

SEQ ID NO: 95782 - RNA, 20 nt, Artificial Sequence
  LRRK2 RNA guide
accuuuuugacuuuucuccc

SEQ ID NO: 95783 - RNA, 20 nt, Artificial Sequence
  LRRK2 RNA guide
acgaggaaacucugaagaag

SEQ ID NO: 95784 - RNA, 20 nt, Artificial Sequence
  LRRK2 RNA guide
acgcugguccaaauccugga

SEQ ID NO: 95785 - RNA, 20 nt, Artificial Sequence
  LRRK2 RNA guide
acggggagaaaagucaaaaa

SEQ ID NO: 95786 - RNA, 20 nt, Artificial Sequence
  LRRK2 RNA guide
acguacuccgagcgcgguaa

SEQ ID NO: 95787 - RNA, 20 nt, Artificial Sequence
  LRRK2 RNA guide
acguccgcugcucagggaac

SEQ ID NO: 95788 - RNA, 20 nt, Artificial Sequence
  LRRK2 RNA guide
acgugaacaccagcagaucc

SEQ ID NO: 95789 - RNA, 20 nt, Artificial Sequence
  LRRK2 RNA guide
acguucaugcugggagggcg

SEQ ID NO: 95790 - RNA, 20 nt, Artificial Sequence
  LRRK2 RNA guide
acuagccaugguggcaccug

SEQ ID NO: 95791 - RNA, 20 nt, Artificial Sequence
  LRRK2 RNA guide
acuaucaacuucuucagagu

SEQ ID NO: 95792 - RNA, 20 nt, Artificial Sequence
  LRRK2 RNA guide
acucccauauccuuuccuua

SEQ ID NO: 95793 - RNA, 20 nt, Artificial Sequence
  LRRK2 RNA guide
acuccgagcgcgguaaucac

SEQ ID NO: 95794 - RNA, 20 nt, Artificial Sequence
  LRRK2 RNA guide
acucugaagaaguugauagu

SEQ ID NO: 95795 - RNA, 20 nt, Artificial Sequence
  LRRK2 RNA guide
acucuuaaggagccgcaaac

SEQ ID NO: 95796 - RNA, 20 nt, Artificial Sequence
  LRRK2 RNA guide
acuuucucccccuccuuaca

SEQ ID NO: 95797 - RNA, 20 nt, Artificial Sequence
  LRRK2 RNA guide
acuuuucuccccguuucaga

SEQ ID NO: 95798 - RNA, 20 nt, Artificial Sequence
  LRRK2 RNA guide
agaaaagucaaaaaggugaa

SEQ ID NO: 95799 - RNA, 20 nt, Artificial Sequence
  LRRK2 RNA guide
agaaacgcugguccaaaucc

SEQ ID NO: 95800 - RNA, 20 nt, Artificial Sequence
  LRRK2 RNA guide
agaaagcagcugagaauuuc

SEQ ID NO: 95801 - RNA, 20 nt, Artificial Sequence
  LRRK2 RNA guide
agaaguugauagucaggcug

SEQ ID NO: 95802 - RNA, 20 nt, Artificial Sequence
  LRRK2 RNA guide
agaauuucaggaaggucuuc

SEQ ID NO: 95803 - RNA, 20 nt, Artificial Sequence
  LRRK2 RNA guide
agaccuuccugaaauucuca

SEQ ID NO: 95804 - RNA, 20 nt, Artificial Sequence
  LRRK2 RNA guide
agaggacgaggaaacucuga

SEQ ID NO: 95805 - RNA, 20 nt, Artificial Sequence
  LRRK2 RNA guide
agaguccggguuugagcagg

SEQ ID NO: 95806 - RNA, 20 nt, Artificial Sequence
  LRRK2 RNA guide
agaguuuccucguccucuuc

SEQ ID NO: 95807 - RNA, 20 nt, Artificial Sequence
  LRRK2 RNA guide
agauagaaacgcugguccaa

SEQ ID NO: 95808 - RNA, 20 nt, Artificial Sequence
  LRRK2 RNA guide
agcagauccuccaggauuug

SEQ ID NO: 95809 - RNA, 20 nt, Artificial Sequence
  LRRK2 RNA guide
agcagcggacguucaugcug

SEQ ID NO: 95810 - RNA, 20 nt, Artificial Sequence
  LRRK2 RNA guide
agcagcugagaauuucagga

SEQ ID NO: 95811 - RNA, 20 nt, Artificial Sequence
  LRRK2 RNA guide
agcagggucaaggggaggag

SEQ ID NO: 95812 - RNA, 20 nt, Artificial Sequence
  LRRK2 RNA guide
agcaggugccaccauggcua

SEQ ID NO: 95813 - RNA, 20 nt, Artificial Sequence
  LRRK2 RNA guide
agcaugaacguccgcugcuc

SEQ ID NO: 95814 - RNA, 20 nt, Artificial Sequence
  LRRK2 RNA guide
agccaugguggcaccugcuu

SEQ ID NO: 95815 - RNA, 20 nt, Artificial Sequence
  LRRK2 RNA guide
agccgcaaacucccauaucc

SEQ ID NO: 95816 - RNA, 20 nt, Artificial Sequence
  LRRK2 RNA guide
agccugacuaucaacuucuu

SEQ ID NO: 95817 - RNA, 20 nt, Artificial Sequence
  LRRK2 RNA guide
agcgcgguaaucacuugaaa

SEQ ID NO: 95818 - RNA, 20 nt, Artificial Sequence
  LRRK2 RNA guide
agcgcuggcugcgggcggug

SEQ ID NO: 95819 - RNA, 20 nt, Artificial Sequence
  LRRK2 RNA guide
agcggacguucaugcuggga

SEQ ID NO: 95820 - RNA, 20 nt, Artificial Sequence
  LRRK2 RNA guide
agcguuucuaucuguuuucc

SEQ ID NO: 95821 - RNA, 20 nt, Artificial Sequence
  LRRK2 RNA guide
agcucaccgcccgcagccag

SEQ ID NO: 95822 - RNA, 20 nt, Artificial Sequence
  LRRK2 RNA guide
agcucagcucaccgcccgca

SEQ ID NO: 95823 - RNA, 20 nt, Artificial Sequence
  LRRK2 RNA guide
agcuccccgggggcgagcuc

SEQ ID NO: 95824 - RNA, 20 nt, Artificial Sequence
  LRRK2 RNA guide
agcugagaauuucaggaagg

SEQ ID NO: 95825 - RNA, 20 nt, Artificial Sequence
  LRRK2 RNA guide
agcugagcucgcccccgggg

SEQ ID NO: 95826 - RNA, 20 nt, Artificial Sequence
  LRRK2 RNA guide
agcugcuuucugcccuaagg

SEQ ID NO: 95827 - RNA, 20 nt, Artificial Sequence
  LRRK2 RNA guide
agcugucaggggugcgaaga

SEQ ID NO: 95828 - RNA, 20 nt, Artificial Sequence
  LRRK2 RNA guide
agcuguggccggcgccccug

SEQ ID NO: 95829 - RNA, 20 nt, Artificial Sequence
  LRRK2 RNA guide
aggaaaacagauagaaacgc

SEQ ID NO: 95830 - RNA, 20 nt, Artificial Sequence
  LRRK2 RNA guide
aggaaacucugaagaaguug

SEQ ID NO: 95831 - RNA, 20 nt, Artificial Sequence
  LRRK2 RNA guide
aggaaaggauaugggaguuu

SEQ ID NO: 95832 - RNA, 20 nt, Artificial Sequence
  LRRK2 RNA guide
aggaaggucuucaccuuuuu

SEQ ID NO: 95833 - RNA, 20 nt, Artificial Sequence
  LRRK2 RNA guide
aggacaaaauuugcaaaugu

SEQ ID NO: 95834 - RNA, 20 nt, Artificial Sequence
  LRRK2 RNA guide
aggacgaggaaacucugaag

SEQ ID NO: 95835 - RNA, 20 nt, Artificial Sequence
  LRRK2 RNA guide
aggagccgcaaacucccaua

SEQ ID NO: 95836 - RNA, 20 nt, Artificial Sequence
  LRRK2 RNA guide
aggaggacaaaauuugcaaa

SEQ ID NO: 95837 - RNA, 20 nt, Artificial Sequence
  LRRK2 RNA guide
aggagggggagaaaguuugc

SEQ ID NO: 95838 - RNA, 20 nt, Artificial Sequence
  LRRK2 RNA guide
aggauaugggaguuugcggc

SEQ ID NO: 95839 - RNA, 20 nt, Artificial Sequence
  LRRK2 RNA guide
aggaucugcugguguucacg

SEQ ID NO: 95840 - RNA, 20 nt, Artificial Sequence
  LRRK2 RNA guide
aggauuuggaccagcguuuc

SEQ ID NO: 95841 - RNA, 20 nt, Artificial Sequence
  LRRK2 RNA guide
aggcugaacaauguccagga

SEQ ID NO: 95842 - RNA, 20 nt, Artificial Sequence
  LRRK2 RNA guide
agggcagaaagcagcugaga

SEQ ID NO: 95843 - RNA, 20 nt, Artificial Sequence
  LRRK2 RNA guide
agggcggcggguuggaagca

SEQ ID NO: 95844 - RNA, 20 nt, Artificial Sequence
  LRRK2 RNA guide
aggggaggaggacaaaauuu

SEQ ID NO: 95845 - RNA, 20 nt, Artificial Sequence
  LRRK2 RNA guide
agggggagaaaguuugcaaa

SEQ ID NO: 95846 - RNA, 20 nt, Artificial Sequence
  LRRK2 RNA guide
aggggugcgaagaggacgag

SEQ ID NO: 95847 - RNA, 20 nt, Artificial Sequence
  LRRK2 RNA guide
agggucaaggggaggaggac

SEQ ID NO: 95848 - RNA, 20 nt, Artificial Sequence
  LRRK2 RNA guide
aggucuucaccuuuuugacu

SEQ ID NO: 95849 - RNA, 20 nt, Artificial Sequence
  LRRK2 RNA guide
aggugaagaccuuccugaaa

SEQ ID NO: 95850 - RNA, 20 nt, Artificial Sequence
  LRRK2 RNA guide
aggugccaccauggcuagug

SEQ ID NO: 95851 - RNA, 20 nt, Artificial Sequence
  LRRK2 RNA guide
aguacgugaacaccagcaga

SEQ ID NO: 95852 - RNA, 20 nt, Artificial Sequence
  LRRK2 RNA guide
agucaaaaaggugaagaccu

SEQ ID NO: 95853 - RNA, 20 nt, Artificial Sequence
  LRRK2 RNA guide
agucaggcugaacaaugucc

SEQ ID NO: 95854 - RNA, 20 nt, Artificial Sequence
  LRRK2 RNA guide
aguccggguuugagcagggu

SEQ ID NO: 95855 - RNA, 20 nt, Artificial Sequence
  LRRK2 RNA guide
agucugaaacggggagaaaa

SEQ ID NO: 95856 - RNA, 20 nt, Artificial Sequence
  LRRK2 RNA guide
agugauuaccgcgcucggag

SEQ ID NO: 95857 - RNA, 20 nt, Artificial Sequence
  LRRK2 RNA guide
aguugauagucaggcugaac

SEQ ID NO: 95858 - RNA, 20 nt, Artificial Sequence
  LRRK2 RNA guide
aguuuauuuucaagugauua

SEQ ID NO: 95859 - RNA, 20 nt, Artificial Sequence
  LRRK2 RNA guide
aguuuccucguccucuucgc

SEQ ID NO: 95860 - RNA, 20 nt, Artificial Sequence
  LRRK2 RNA guide
aguuugcggcuccuuaagag

SEQ ID NO: 95861 - RNA, 20 nt, Artificial Sequence
  LRRK2 RNA guide
auagaaacgcugguccaaau

SEQ ID NO: 95862 - RNA, 20 nt, Artificial Sequence
  LRRK2 RNA guide
auagucaggcugaacaaugu

SEQ ID NO: 95863 - RNA, 20 nt, Artificial Sequence
  LRRK2 RNA guide
auauccuuuccuuagggcag

SEQ ID NO: 95864 - RNA, 20 nt, Artificial Sequence
  LRRK2 RNA guide
auaugggaguuugcggcucc

SEQ ID NO: 95865 - RNA, 20 nt, Artificial Sequence
  LRRK2 RNA guide
aucaacuucuucagaguuuc

SEQ ID NO: 95866 - RNA, 20 nt, Artificial Sequence
  LRRK2 RNA guide
auccuggaggaucugcuggu

SEQ ID NO: 95867 - RNA, 20 nt, Artificial Sequence
  LRRK2 RNA guide
auccuuuccuuagggcagaa

SEQ ID NO: 95868 - RNA, 20 nt, Artificial Sequence
  LRRK2 RNA guide
aucugcugguguucacguac

SEQ ID NO: 95869 - RNA, 20 nt, Artificial Sequence
  LRRK2 RNA guide
aucuguuuuccuuccuggac

SEQ ID NO: 95870 - RNA, 20 nt, Artificial Sequence
  LRRK2 RNA guide
augaacguccgcugcucagg

SEQ ID NO: 95871 - RNA, 20 nt, Artificial Sequence
  LRRK2 RNA guide
augcugggagggcggcgggu

SEQ ID NO: 95872 - RNA, 20 nt, Artificial Sequence
  LRRK2 RNA guide
auggcuaguggcagcuguca

SEQ ID NO: 95873 - RNA, 20 nt, Artificial Sequence
  LRRK2 RNA guide
augggaguuugcggcuccuu

SEQ ID NO: 95874 - RNA, 20 nt, Artificial Sequence
  LRRK2 RNA guide
augguggcaccugcuuccaa

SEQ ID NO: 95875 - RNA, 20 nt, Artificial Sequence
  LRRK2 RNA guide
auguaaggagggggagaaag

SEQ ID NO: 95876 - RNA, 20 nt, Artificial Sequence
  LRRK2 RNA guide
auguccaggaaggaaaacag

SEQ ID NO: 95877 - RNA, 20 nt, Artificial Sequence
  LRRK2 RNA guide
auuaccgcgcucggaguacg

SEQ ID NO: 95878 - RNA, 20 nt, Artificial Sequence
  LRRK2 RNA guide
auucucagcugcuuucugcc

SEQ ID NO: 95879 - RNA, 20 nt, Artificial Sequence
  LRRK2 RNA guide
auuguucagccugacuauca

SEQ ID NO: 95880 - RNA, 20 nt, Artificial Sequence
  LRRK2 RNA guide
auuucaggaaggucuucacc

SEQ ID NO: 95881 - RNA, 20 nt, Artificial Sequence
  LRRK2 RNA guide
auuugcaaauguaaggaggg

SEQ ID NO: 95882 - RNA, 20 nt, Artificial Sequence
  LRRK2 RNA guide
auuugcaaauuuuguccucc

SEQ ID NO: 95883 - RNA, 20 nt, Artificial Sequence
  LRRK2 RNA guide
auuuggaccagcguuucuau

SEQ ID NO: 95884 - RNA, 20 nt, Artificial Sequence
  LRRK2 RNA guide
auuuucaagugauuaccgcg

SEQ ID NO: 95885 - RNA, 20 nt, Artificial Sequence
  LRRK2 RNA guide
auuuuguccuccuccccuug

SEQ ID NO: 95886 - RNA, 20 nt, Artificial Sequence
  LRRK2 RNA guide
auuuuugcaaacuuucuccc

SEQ ID NO: 95887 - RNA, 20 nt, Artificial Sequence
  LRRK2 RNA guide
caaaaaggugaagaccuucc

SEQ ID NO: 95888 - RNA, 20 nt, Artificial Sequence
  LRRK2 RNA guide
caaaauuugcaaauguaagg

SEQ ID NO: 95889 - RNA, 20 nt, Artificial Sequence
  LRRK2 RNA guide
caaacccggacucuuaagga

SEQ ID NO: 95890 - RNA, 20 nt, Artificial Sequence
  LRRK2 RNA guide
caaacucccauauccuuucc

SEQ ID NO: 95891 - RNA, 20 nt, Artificial Sequence
  LRRK2 RNA guide
caaacuuucucccccuccuu

SEQ ID NO: 95892 - RNA, 20 nt, Artificial Sequence
  LRRK2 RNA guide
caaauccuggaggaucugcu

SEQ ID NO: 95893 - RNA, 20 nt, Artificial Sequence
  LRRK2 RNA guide
caaauguaaggagggggaga

SEQ ID NO: 95894 - RNA, 20 nt, Artificial Sequence
  LRRK2 RNA guide
caaauuuuguccuccucccc

SEQ ID NO: 95895 - RNA, 20 nt, Artificial Sequence
  LRRK2 RNA guide
caacccgccgcccucccagc

SEQ ID NO: 95896 - RNA, 20 nt, Artificial Sequence
  LRRK2 RNA guide
caacuucuucagaguuuccu

SEQ ID NO: 95897 - RNA, 20 nt, Artificial Sequence
  LRRK2 RNA guide
caaggggaggaggacaaaau

SEQ ID NO: 95898 - RNA, 20 nt, Artificial Sequence
  LRRK2 RNA guide
caagugauuaccgcgcucgg

SEQ ID NO: 95899 - RNA, 20 nt, Artificial Sequence
  LRRK2 RNA guide
caauguccaggaaggaaaac

SEQ ID NO: 95900 - RNA, 20 nt, Artificial Sequence
  LRRK2 RNA guide
cacagcuccccgggggcgag

SEQ ID NO: 95901 - RNA, 20 nt, Artificial Sequence
  LRRK2 RNA guide
cacaguuuauuuucaaguga

SEQ ID NO: 95902 - RNA, 20 nt, Artificial Sequence
  LRRK2 RNA guide
caccagcagauccuccagga

SEQ ID NO: 95903 - RNA, 20 nt, Artificial Sequence
  LRRK2 RNA guide
caccauggcuaguggcagcu

SEQ ID NO: 95904 - RNA, 20 nt, Artificial Sequence
  LRRK2 RNA guide
caccccugacagcugccacu

SEQ ID NO: 95905 - RNA, 20 nt, Artificial Sequence
  LRRK2 RNA guide
caccugcuuccaacccgccg

SEQ ID NO: 95906 - RNA, 20 nt, Artificial Sequence
  LRRK2 RNA guide
caccuuuuugacuuuucucc

SEQ ID NO: 95907 - RNA, 20 nt, Artificial Sequence
  LRRK2 RNA guide
cacguacuccgagcgcggua

SEQ ID NO: 95908 - RNA, 20 nt, Artificial Sequence
  LRRK2 RNA guide
cacuagccaugguggcaccu

SEQ ID NO: 95909 - RNA, 20 nt, Artificial Sequence
  LRRK2 RNA guide
cagaaagcagcugagaauuu

SEQ ID NO: 95910 - RNA, 20 nt, Artificial Sequence
  LRRK2 RNA guide
cagauagaaacgcuggucca

SEQ ID NO: 95911 - RNA, 20 nt, Artificial Sequence
  LRRK2 RNA guide
cagcaugaacguccgcugcu

SEQ ID NO: 95912 - RNA, 20 nt, Artificial Sequence
  LRRK2 RNA guide
cagcggacguucaugcuggg

SEQ ID NO: 95913 - RNA, 20 nt, Artificial Sequence
  LRRK2 RNA guide
cagcguuucuaucuguuuuc

SEQ ID NO: 95914 - RNA, 20 nt, Artificial Sequence
  LRRK2 RNA guide
cagcucaccgcccgcagcca

SEQ ID NO: 95915 - RNA, 20 nt, Artificial Sequence
  LRRK2 RNA guide
cagcuccccgggggcgagcu

SEQ ID NO: 95916 - RNA, 20 nt, Artificial Sequence
  LRRK2 RNA guide
cagcugagaauuucaggaag

SEQ ID NO: 95917 - RNA, 20 nt, Artificial Sequence
  LRRK2 RNA guide
cagcugccacuagccauggu

SEQ ID NO: 95918 - RNA, 20 nt, Artificial Sequence
  LRRK2 RNA guide
cagcugcuuucugcccuaag

SEQ ID NO: 95919 - RNA, 20 nt, Artificial Sequence
  LRRK2 RNA guide
cagcugucaggggugcgaag

SEQ ID NO: 95920 - RNA, 20 nt, Artificial Sequence
  LRRK2 RNA guide
caggaaggucuucaccuuuu

SEQ ID NO: 95921 - RNA, 20 nt, Artificial Sequence
  LRRK2 RNA guide
caggauuuggaccagcguuu

SEQ ID NO: 95922 - RNA, 20 nt, Artificial Sequence
  LRRK2 RNA guide
caggcugaacaauguccagg

SEQ ID NO: 95923 - RNA, 20 nt, Artificial Sequence
  LRRK2 RNA guide
caggggugcgaagaggacga

SEQ ID NO: 95924 - RNA, 20 nt, Artificial Sequence
  LRRK2 RNA guide
cagggucaaggggaggagga

SEQ ID NO: 95925 - RNA, 20 nt, Artificial Sequence
  LRRK2 RNA guide
caggugccaccauggcuagu

SEQ ID NO: 95926 - RNA, 20 nt, Artificial Sequence
  LRRK2 RNA guide
caguuuauuuucaagugauu

SEQ ID NO: 95927 - RNA, 20 nt, Artificial Sequence
  LRRK2 RNA guide
cauauccuuuccuuagggca

SEQ ID NO: 95928 - RNA, 20 nt, Artificial Sequence
  LRRK2 RNA guide
caugaacguccgcugcucag

SEQ ID NO: 95929 - RNA, 20 nt, Artificial Sequence
  LRRK2 RNA guide
caugcugggagggcggcggg

SEQ ID NO: 95930 - RNA, 20 nt, Artificial Sequence
  LRRK2 RNA guide
cauggcuaguggcagcuguc

SEQ ID NO: 95931 - RNA, 20 nt, Artificial Sequence
  LRRK2 RNA guide
caugguggcaccugcuucca

SEQ ID NO: 95932 - RNA, 20 nt, Artificial Sequence
  LRRK2 RNA guide
cauuguucagccugacuauc

SEQ ID NO: 95933 - RNA, 20 nt, Artificial Sequence
  LRRK2 RNA guide
cauuugcaaauuuuguccuc

SEQ ID NO: 95934 - RNA, 20 nt, Artificial Sequence
  LRRK2 RNA guide
ccaaauccuggaggaucugc

SEQ ID NO: 95935 - RNA, 20 nt, Artificial Sequence
  LRRK2 RNA guide
ccaacccgccgcccucccag

SEQ ID NO: 95936 - RNA, 20 nt, Artificial Sequence
  LRRK2 RNA guide
ccacagcuccccgggggcga

SEQ ID NO: 95937 - RNA, 20 nt, Artificial Sequence
  LRRK2 RNA guide
ccaccauggcuaguggcagc

SEQ ID NO: 95938 - RNA, 20 nt, Artificial Sequence
  LRRK2 RNA guide
ccacuagccaugguggcacc

SEQ ID NO: 95939 - RNA, 20 nt, Artificial Sequence
  LRRK2 RNA guide
ccagcagauccuccaggauu

SEQ ID NO: 95940 - RNA, 20 nt, Artificial Sequence
  LRRK2 RNA guide
ccagcaugaacguccgcugc

SEQ ID NO: 95941 - RNA, 20 nt, Artificial Sequence
  LRRK2 RNA guide
ccagcguuucuaucuguuuu

SEQ ID NO: 95942 - RNA, 20 nt, Artificial Sequence
  LRRK2 RNA guide
ccaggauuuggaccagcguu

SEQ ID NO: 95943 - RNA, 20 nt, Artificial Sequence
  LRRK2 RNA guide
ccauauccuuuccuuagggc

SEQ ID NO: 95944 - RNA, 20 nt, Artificial Sequence
  LRRK2 RNA guide
ccauggcuaguggcagcugu

SEQ ID NO: 95945 - RNA, 20 nt, Artificial Sequence
  LRRK2 RNA guide
ccaugguggcaccugcuucc

SEQ ID NO: 95946 - RNA, 20 nt, Artificial Sequence
  LRRK2 RNA guide
cccagcaugaacguccgcug

SEQ ID NO: 95947 - RNA, 20 nt, Artificial Sequence
  LRRK2 RNA guide
cccauauccuuuccuuaggg

SEQ ID NO: 95948 - RNA, 20 nt, Artificial Sequence
  LRRK2 RNA guide
cccccuccuuacauuugcaa

SEQ ID NO: 95949 - RNA, 20 nt, Artificial Sequence
  LRRK2 RNA guide
ccccgggggcgagcucagcu

SEQ ID NO: 95950 - RNA, 20 nt, Artificial Sequence
  LRRK2 RNA guide
ccccuccuuacauuugcaaa

SEQ ID NO: 95951 - RNA, 20 nt, Artificial Sequence
  LRRK2 RNA guide
ccccugacagcugccacuag

SEQ ID NO: 95952 - RNA, 20 nt, Artificial Sequence
  LRRK2 RNA guide
ccccuugacccugcucaaac

SEQ ID NO: 95953 - RNA, 20 nt, Artificial Sequence
  LRRK2 RNA guide
cccgccgcccucccagcaug

SEQ ID NO: 95954 - RNA, 20 nt, Artificial Sequence
  LRRK2 RNA guide
cccggacucuuaaggagccg

SEQ ID NO: 95955 - RNA, 20 nt, Artificial Sequence
  LRRK2 RNA guide
cccgggggcgagcucagcuc

SEQ ID NO: 95956 - RNA, 20 nt, Artificial Sequence
  LRRK2 RNA guide
cccuaaggaaaggauauggg

SEQ ID NO: 95957 - RNA, 20 nt, Artificial Sequence
  LRRK2 RNA guide
cccucccagcaugaacgucc

SEQ ID NO: 95958 - RNA, 20 nt, Artificial Sequence
  LRRK2 RNA guide
cccuccuuacauuugcaaau

SEQ ID NO: 95959 - RNA, 20 nt, Artificial Sequence
  LRRK2 RNA guide
cccugacagcugccacuagc

SEQ ID NO: 95960 - RNA, 20 nt, Artificial Sequence
  LRRK2 RNA guide
cccugagcagcggacguuca

SEQ ID NO: 95961 - RNA, 20 nt, Artificial Sequence
  LRRK2 RNA guide
cccugcucaaacccggacuc

SEQ ID NO: 95962 - RNA, 20 nt, Artificial Sequence
  LRRK2 RNA guide
cccuugacccugcucaaacc

SEQ ID NO: 95963 - RNA, 20 nt, Artificial Sequence
  LRRK2 RNA guide
ccgagcgcgguaaucacuug

SEQ ID NO: 95964 - RNA, 20 nt, Artificial Sequence
  LRRK2 RNA guide
ccgcaaacucccauauccuu

SEQ ID NO: 95965 - RNA, 20 nt, Artificial Sequence
  LRRK2 RNA guide
ccgcgcucggaguacgugaa

SEQ ID NO: 95966 - RNA, 20 nt, Artificial Sequence
  LRRK2 RNA guide
ccgcugcucagggaaccggc

SEQ ID NO: 95967 - RNA, 20 nt, Artificial Sequence
  LRRK2 RNA guide
ccggacucuuaaggagccgc

SEQ ID NO: 95968 - RNA, 20 nt, Artificial Sequence
  LRRK2 RNA guide
ccggcgccccugccgguucc

SEQ ID NO: 95969 - RNA, 20 nt, Artificial Sequence
  LRRK2 RNA guide
ccgggggcgagcucagcuca

SEQ ID NO: 95970 - RNA, 20 nt, Artificial Sequence
  LRRK2 RNA guide
ccggguuugagcagggucaa

SEQ ID NO: 95971 - RNA, 20 nt, Artificial Sequence
  LRRK2 RNA guide
ccgguucccugagcagcgga

SEQ ID NO: 95972 - RNA, 20 nt, Artificial Sequence
  LRRK2 RNA guide
ccuaaggaaaggauauggga

SEQ ID NO: 95973 - RNA, 20 nt, Artificial Sequence
  LRRK2 RNA guide
ccuccaggauuuggaccagc

SEQ ID NO: 95974 - RNA, 20 nt, Artificial Sequence
  LRRK2 RNA guide
ccucccagcaugaacguccg

SEQ ID NO: 95975 - RNA, 20 nt, Artificial Sequence
  LRRK2 RNA guide
ccuccccuugacccugcuca

SEQ ID NO: 95976 - RNA, 20 nt, Artificial Sequence
  LRRK2 RNA guide
ccuccuccccuugacccugc

SEQ ID NO: 95977 - RNA, 20 nt, Artificial Sequence
  LRRK2 RNA guide
ccuccuuacauuugcaaauu

SEQ ID NO: 95978 - RNA, 20 nt, Artificial Sequence
  LRRK2 RNA guide
ccucguccucuucgcacccc

SEQ ID NO: 95979 - RNA, 20 nt, Artificial Sequence
  LRRK2 RNA guide
ccugaaauucucagcugcuu

SEQ ID NO: 95980 - RNA, 20 nt, Artificial Sequence
  LRRK2 RNA guide
ccugacagcugccacuagcc

SEQ ID NO: 95981 - RNA, 20 nt, Artificial Sequence
  LRRK2 RNA guide
ccugacuaucaacuucuuca

SEQ ID NO: 95982 - RNA, 20 nt, Artificial Sequence
  LRRK2 RNA guide
ccugagcagcggacguucau

SEQ ID NO: 95983 - RNA, 20 nt, Artificial Sequence
  LRRK2 RNA guide
ccugcucaaacccggacucu

SEQ ID NO: 95984 - RNA, 20 nt, Artificial Sequence
  LRRK2 RNA guide
ccugcuuccaacccgccgcc

SEQ ID NO: 95985 - RNA, 20 nt, Artificial Sequence
  LRRK2 RNA guide
ccuggacauuguucagccug

SEQ ID NO: 95986 - RNA, 20 nt, Artificial Sequence
  LRRK2 RNA guide
ccuggaggaucugcuggugu

SEQ ID NO: 95987 - RNA, 20 nt, Artificial Sequence
  LRRK2 RNA guide
ccuuaagaguccggguuuga

SEQ ID NO: 95988 - RNA, 20 nt, Artificial Sequence
  LRRK2 RNA guide
ccuuacauuugcaaauuuug

SEQ ID NO: 95989 - RNA, 20 nt, Artificial Sequence
  LRRK2 RNA guide
ccuuagggcagaaagcagcu

SEQ ID NO: 95990 - RNA, 20 nt, Artificial Sequence
  LRRK2 RNA guide
ccuuccugaaauucucagcu

SEQ ID NO: 95991 - RNA, 20 nt, Artificial Sequence
  LRRK2 RNA guide
ccuuccuggacauuguucag

SEQ ID NO: 95992 - RNA, 20 nt, Artificial Sequence
  LRRK2 RNA guide
ccuugacccugcucaaaccc

SEQ ID NO: 95993 - RNA, 20 nt, Artificial Sequence
  LRRK2 RNA guide
ccuuuccuuagggcagaaag

SEQ ID NO: 95994 - RNA, 20 nt, Artificial Sequence
  LRRK2 RNA guide
ccuuuuugacuuuucucccc

SEQ ID NO: 95995 - RNA, 20 nt, Artificial Sequence
  LRRK2 RNA guide
cgaagaggacgaggaaacuc

SEQ ID NO: 95996 - RNA, 20 nt, Artificial Sequence
  LRRK2 RNA guide
cgagcgcgguaaucacuuga

SEQ ID NO: 95997 - RNA, 20 nt, Artificial Sequence
  LRRK2 RNA guide
cgagcucagcucaccgcccg

SEQ ID NO: 95998 - RNA, 20 nt, Artificial Sequence
  LRRK2 RNA guide
cgaggaaacucugaagaagu

SEQ ID NO: 95999 - RNA, 20 nt, Artificial Sequence
  LRRK2 RNA guide
cgcaaacucccauauccuuu

SEQ ID NO: 96000 - RNA, 20 nt, Artificial Sequence
  LRRK2 RNA guide
cgcaccccugacagcugcca

SEQ ID NO: 96001 - RNA, 20 nt, Artificial Sequence
  LRRK2 RNA guide
cgccccugccgguucccuga

SEQ ID NO: 96002 - RNA, 20 nt, Artificial Sequence
  LRRK2 RNA guide
cgcgcucggaguacgugaac

SEQ ID NO: 96003 - RNA, 20 nt, Artificial Sequence
  LRRK2 RNA guide
cgcgguaaucacuugaaaau

SEQ ID NO: 96004 - RNA, 20 nt, Artificial Sequence
  LRRK2 RNA guide
cgcucggaguacgugaacac

SEQ ID NO: 96005 - RNA, 20 nt, Artificial Sequence
  LRRK2 RNA guide
cgcugcucagggaaccggca

SEQ ID NO: 96006 - RNA, 20 nt, Artificial Sequence
  LRRK2 RNA guide
cgcuggcugcgggcggugag

SEQ ID NO: 96007 - RNA, 20 nt, Artificial Sequence
  LRRK2 RNA guide
cgcugguccaaauccuggag

SEQ ID NO: 96008 - RNA, 20 nt, Artificial Sequence
  LRRK2 RNA guide
cggacguucaugcugggagg

SEQ ID NO: 96009 - RNA, 20 nt, Artificial Sequence
  LRRK2 RNA guide
cggacucuuaaggagccgca

SEQ ID NO: 96010 - RNA, 20 nt, Artificial Sequence
  LRRK2 RNA guide
cggaguacgugaacaccagc

SEQ ID NO: 96011 - RNA, 20 nt, Artificial Sequence
  LRRK2 RNA guide
cggcgccccugccgguuccc

SEQ ID NO: 96012 - RNA, 20 nt, Artificial Sequence
  LRRK2 RNA guide
cggcggguuggaagcaggug

SEQ ID NO: 96013 - RNA, 20 nt, Artificial Sequence
  LRRK2 RNA guide
cggcuccuuaagaguccggg

SEQ ID NO: 96014 - RNA, 20 nt, Artificial Sequence
  LRRK2 RNA guide
cggggagaaaagucaaaaag

SEQ ID NO: 96015 - RNA, 20 nt, Artificial Sequence
  LRRK2 RNA guide
cgggggcgagcucagcucac

SEQ ID NO: 96016 - RNA, 20 nt, Artificial Sequence
  LRRK2 RNA guide
cggguuggaagcaggugcca

SEQ ID NO: 96017 - RNA, 20 nt, Artificial Sequence
  LRRK2 RNA guide
cggguuugagcagggucaag

SEQ ID NO: 96018 - RNA, 20 nt, Artificial Sequence
  LRRK2 RNA guide
cgguaaucacuugaaaauaa

SEQ ID NO: 96019 - RNA, 20 nt, Artificial Sequence
  LRRK2 RNA guide
cggugagcugagcucgcccc

SEQ ID NO: 96020 - RNA, 20 nt, Artificial Sequence
  LRRK2 RNA guide
cgguucccugagcagcggac

SEQ ID NO: 96021 - RNA, 20 nt, Artificial Sequence
  LRRK2 RNA guide
cguacuccgagcgcgguaau

SEQ ID NO: 96022 - RNA, 20 nt, Artificial Sequence
  LRRK2 RNA guide
cguccucuucgcaccccuga

SEQ ID NO: 96023 - RNA, 20 nt, Artificial Sequence
  LRRK2 RNA guide
cguucaugcugggagggcgg

SEQ ID NO: 96024 - RNA, 20 nt, Artificial Sequence
  LRRK2 RNA guide
cuaaggaaaggauaugggag

SEQ ID NO: 96025 - RNA, 20 nt, Artificial Sequence
  LRRK2 RNA guide
cuagccaugguggcaccugc

SEQ ID NO: 96026 - RNA, 20 nt, Artificial Sequence
  LRRK2 RNA guide
cuaucaacuucuucagaguu

SEQ ID NO: 96027 - RNA, 20 nt, Artificial Sequence
  LRRK2 RNA guide
cucaaacccggacucuuaag

SEQ ID NO: 96028 - RNA, 20 nt, Artificial Sequence
  LRRK2 RNA guide
cucaccgcccgcagccagcg

SEQ ID NO: 96029 - RNA, 20 nt, Artificial Sequence
  LRRK2 RNA guide
cucagcucaccgcccgcagc

SEQ ID NO: 96030 - RNA, 20 nt, Artificial Sequence
  LRRK2 RNA guide
cucagcugcuuucugcccua

SEQ ID NO: 96031 - RNA, 20 nt, Artificial Sequence
  LRRK2 RNA guide
cucccagcaugaacguccgc

SEQ ID NO: 96032 - RNA, 20 nt, Artificial Sequence
  LRRK2 RNA guide
cucccauauccuuuccuuag

SEQ ID NO: 96033 - RNA, 20 nt, Artificial Sequence
  LRRK2 RNA guide
cucccccuccuuacauuugc

SEQ ID NO: 96034 - RNA, 20 nt, Artificial Sequence
  LRRK2 RNA guide
cuccccgggggcgagcucag

SEQ ID NO: 96035 - RNA, 20 nt, Artificial Sequence
  LRRK2 RNA guide
cuccccuugacccugcucaa

SEQ ID NO: 96036 - RNA, 20 nt, Artificial Sequence
  LRRK2 RNA guide
cuccgagcgcgguaaucacu

SEQ ID NO: 96037 - RNA, 20 nt, Artificial Sequence
  LRRK2 RNA guide
cuccuccccuugacccugcu

SEQ ID NO: 96038 - RNA, 20 nt, Artificial Sequence
  LRRK2 RNA guide
cuccuuacauuugcaaauuu

SEQ ID NO: 96039 - RNA, 20 nt, Artificial Sequence
  LRRK2 RNA guide
cucggaguacgugaacacca

SEQ ID NO: 96040 - RNA, 20 nt, Artificial Sequence
  LRRK2 RNA guide
cucguccucuucgcaccccu

SEQ ID NO: 96041 - RNA, 20 nt, Artificial Sequence
  LRRK2 RNA guide
cucugaagaaguugauaguc

SEQ ID NO: 96042 - RNA, 20 nt, Artificial Sequence
  LRRK2 RNA guide
cucuuaaggagccgcaaacu

SEQ ID NO: 96043 - RNA, 20 nt, Artificial Sequence
  LRRK2 RNA guide
cucuucgcaccccugacagc

SEQ ID NO: 96044 - RNA, 20 nt, Artificial Sequence
  LRRK2 RNA guide
cugaaacggggagaaaaguc

SEQ ID NO: 96045 - RNA, 20 nt, Artificial Sequence
  LRRK2 RNA guide
cugaaauucucagcugcuuu

SEQ ID NO: 96046 - RNA, 20 nt, Artificial Sequence
  LRRK2 RNA guide
cugaacaauguccaggaagg

SEQ ID NO: 96047 - RNA, 20 nt, Artificial Sequence
  LRRK2 RNA guide
cugaagaaguugauagucag

SEQ ID NO: 96048 - RNA, 20 nt, Artificial Sequence
  LRRK2 RNA guide
cugacagcugccacuagcca

SEQ ID NO: 96049 - RNA, 20 nt, Artificial Sequence
  LRRK2 RNA guide
cugacuaucaacuucuucag

SEQ ID NO: 96050 - RNA, 20 nt, Artificial Sequence
  LRRK2 RNA guide
cugagaauuucaggaagguc

SEQ ID NO: 96051 - RNA, 20 nt, Artificial Sequence
  LRRK2 RNA guide
cugagcagcggacguucaug

SEQ ID NO: 96052 - RNA, 20 nt, Artificial Sequence
  LRRK2 RNA guide
cugagcucgcccccggggag

SEQ ID NO: 96053 - RNA, 20 nt, Artificial Sequence
  LRRK2 RNA guide
cugccacuagccaugguggc

SEQ ID NO: 96054 - RNA, 20 nt, Artificial Sequence
  LRRK2 RNA guide
cugcccuaaggaaaggauau

SEQ ID NO: 96055 - RNA, 20 nt, Artificial Sequence
  LRRK2 RNA guide
cugcucaaacccggacucuu

SEQ ID NO: 96056 - RNA, 20 nt, Artificial Sequence
  LRRK2 RNA guide
cugcugguguucacguacuc

SEQ ID NO: 96057 - RNA, 20 nt, Artificial Sequence
  LRRK2 RNA guide
cugcuuccaacccgccgccc

SEQ ID NO: 96058 - RNA, 20 nt, Artificial Sequence
  LRRK2 RNA guide
cugcuuucugcccuaaggaa

SEQ ID NO: 96059 - RNA, 20 nt, Artificial Sequence
  LRRK2 RNA guide
cuggacauuguucagccuga

SEQ ID NO: 96060 - RNA, 20 nt, Artificial Sequence
  LRRK2 RNA guide
cuggaggaucugcugguguu

SEQ ID NO: 96061 - RNA, 20 nt, Artificial Sequence
  LRRK2 RNA guide
cuggcugcgggcggugagcu

SEQ ID NO: 96062 - RNA, 20 nt, Artificial Sequence
  LRRK2 RNA guide
cugggagggcggcggguugg

SEQ ID NO: 96063 - RNA, 20 nt, Artificial Sequence
  LRRK2 RNA guide
cugguccaaauccuggagga

SEQ ID NO: 96064 - RNA, 20 nt, Artificial Sequence
  LRRK2 RNA guide
cugguguucacguacuccga

SEQ ID NO: 96065 - RNA, 20 nt, Artificial Sequence
  LRRK2 RNA guide
cugucaggggugcgaagagg

SEQ ID NO: 96066 - RNA, 20 nt, Artificial Sequence
  LRRK2 RNA guide
cuguggccggcgccccugcc

SEQ ID NO: 96067 - RNA, 20 nt, Artificial Sequence
  LRRK2 RNA guide
cuguuuuccuuccuggacau

SEQ ID NO: 96068 - RNA, 20 nt, Artificial Sequence
  LRRK2 RNA guide
cuuaagaguccggguuugag

SEQ ID NO: 96069 - RNA, 20 nt, Artificial Sequence
  LRRK2 RNA guide
cuuaaggagccgcaaacucc

SEQ ID NO: 96070 - RNA, 20 nt, Artificial Sequence
  LRRK2 RNA guide
cuuacauuugcaaauuuugu

SEQ ID NO: 96071 - RNA, 20 nt, Artificial Sequence
  LRRK2 RNA guide
cuuagggcagaaagcagcug

SEQ ID NO: 96072 - RNA, 20 nt, Artificial Sequence
  LRRK2 RNA guide
cuucaccuuuuugacuuuuc

SEQ ID NO: 96073 - RNA, 20 nt, Artificial Sequence
  LRRK2 RNA guide
cuuccaacccgccgcccucc

SEQ ID NO: 96074 - RNA, 20 nt, Artificial Sequence
  LRRK2 RNA guide
cuuccugaaauucucagcug

SEQ ID NO: 96075 - RNA, 20 nt, Artificial Sequence
  LRRK2 RNA guide
cuuccuggacauuguucagc

SEQ ID NO: 96076 - RNA, 20 nt, Artificial Sequence
  LRRK2 RNA guide
cuucgcaccccugacagcug

SEQ ID NO: 96077 - RNA, 20 nt, Artificial Sequence
  LRRK2 RNA guide
cuucuucagaguuuccucgu

SEQ ID NO: 96078 - RNA, 20 nt, Artificial Sequence
  LRRK2 RNA guide
cuugacccugcucaaacccg

SEQ ID NO: 96079 - RNA, 20 nt, Artificial Sequence
  LRRK2 RNA guide
cuuuccuuagggcagaaagc

SEQ ID NO: 96080 - RNA, 20 nt, Artificial Sequence
  LRRK2 RNA guide
cuuucucccccuccuuacau

SEQ ID NO: 96081 - RNA, 20 nt, Artificial Sequence
  LRRK2 RNA guide
cuuucugcccuaaggaaagg

SEQ ID NO: 96082 - RNA, 20 nt, Artificial Sequence
  LRRK2 RNA guide
cuuuuauuuuugcaaacuuu

SEQ ID NO: 96083 - RNA, 20 nt, Artificial Sequence
  LRRK2 RNA guide
cuuuucuccccguuucagac

SEQ ID NO: 96084 - RNA, 20 nt, Artificial Sequence
  LRRK2 RNA guide
cuuuuuagucugaaacgggg

SEQ ID NO: 96085 - RNA, 20 nt, Artificial Sequence
  LRRK2 RNA guide
cuuuuugacuuuucuccccg

SEQ ID NO: 96086 - RNA, 20 nt, Artificial Sequence
  LRRK2 RNA guide
gaaaacagauagaaacgcug

SEQ ID NO: 96087 - RNA, 20 nt, Artificial Sequence
  LRRK2 RNA guide
gaaaagucaaaaaggugaag

SEQ ID NO: 96088 - RNA, 20 nt, Artificial Sequence
  LRRK2 RNA guide
gaaacgcugguccaaauccu

SEQ ID NO: 96089 - RNA, 20 nt, Artificial Sequence
  LRRK2 RNA guide
gaaacggggagaaaagucaa

SEQ ID NO: 96090 - RNA, 20 nt, Artificial Sequence
  LRRK2 RNA guide
gaaacucugaagaaguugau

SEQ ID NO: 96091 - RNA, 20 nt, Artificial Sequence
  LRRK2 RNA guide
gaaagcagcugagaauuuca

SEQ ID NO: 96092 - RNA, 20 nt, Artificial Sequence
  LRRK2 RNA guide
gaaaggauaugggaguuugc

SEQ ID NO: 96093 - RNA, 20 nt, Artificial Sequence
  LRRK2 RNA guide
gaaauucucagcugcuuucu

SEQ ID NO: 96094 - RNA, 20 nt, Artificial Sequence
  LRRK2 RNA guide
gaacaauguccaggaaggaa

SEQ ID NO: 96095 - RNA, 20 nt, Artificial Sequence
  LRRK2 RNA guide
gaacaccagcagauccucca

SEQ ID NO: 96096 - RNA, 20 nt, Artificial Sequence
  LRRK2 RNA guide
gaaccggcaggggcgccggc

SEQ ID NO: 96097 - RNA, 20 nt, Artificial Sequence
  LRRK2 RNA guide
gaacguccgcugcucaggga

SEQ ID NO: 96098 - RNA, 20 nt, Artificial Sequence
  LRRK2 RNA guide
gaagaaguugauagucaggc

SEQ ID NO: 96099 - RNA, 20 nt, Artificial Sequence
  LRRK2 RNA guide
gaagaccuuccugaaauucu

SEQ ID NO: 96100 - RNA, 20 nt, Artificial Sequence
  LRRK2 RNA guide
gaagaggacgaggaaacucu

SEQ ID NO: 96101 - RNA, 20 nt, Artificial Sequence
  LRRK2 RNA guide
gaagcaggugccaccauggc

SEQ ID NO: 96102 - RNA, 20 nt, Artificial Sequence
  LRRK2 RNA guide
gaaggucuucaccuuuuuga

SEQ ID NO: 96103 - RNA, 20 nt, Artificial Sequence
  LRRK2 RNA guide
gaaguugauagucaggcuga

SEQ ID NO: 96104 - RNA, 20 nt, Artificial Sequence
  LRRK2 RNA guide
gaauuucaggaaggucuuca

SEQ ID NO: 96105 - RNA, 20 nt, Artificial Sequence
  LRRK2 RNA guide
gacaaaauuugcaaauguaa

SEQ ID NO: 96106 - RNA, 20 nt, Artificial Sequence
  LRRK2 RNA guide
gacagcugccacuagccaug

SEQ ID NO: 96107 - RNA, 20 nt, Artificial Sequence
  LRRK2 RNA guide
gacauuguucagccugacua

SEQ ID NO: 96108 - RNA, 20 nt, Artificial Sequence
  LRRK2 RNA guide
gaccagcguuucuaucuguu

SEQ ID NO: 96109 - RNA, 20 nt, Artificial Sequence
  LRRK2 RNA guide
gacccugcucaaacccggac

SEQ ID NO: 96110 - RNA, 20 nt, Artificial Sequence
  LRRK2 RNA guide
gaccuuccugaaauucucag

SEQ ID NO: 96111 - RNA, 20 nt, Artificial Sequence
  LRRK2 RNA guide
gacgaggaaacucugaagaa

SEQ ID NO: 96112 - RNA, 20 nt, Artificial Sequence
  LRRK2 RNA guide
gacguucaugcugggagggc

SEQ ID NO: 96113 - RNA, 20 nt, Artificial Sequence
  LRRK2 RNA guide
gacuaucaacuucuucagag

SEQ ID NO: 96114 - RNA, 20 nt, Artificial Sequence
  LRRK2 RNA guide
gacucuuaaggagccgcaaa

SEQ ID NO: 96115 - RNA, 20 nt, Artificial Sequence
  LRRK2 RNA guide
gacuuuucuccccguuucag

SEQ ID NO: 96116 - RNA, 20 nt, Artificial Sequence
  LRRK2 RNA guide
gagaaaagucaaaaagguga

SEQ ID NO: 96117 - RNA, 20 nt, Artificial Sequence
  LRRK2 RNA guide
gagaauuucaggaaggucuu

SEQ ID NO: 96118 - RNA, 20 nt, Artificial Sequence
  LRRK2 RNA guide
gagcagcggacguucaugcu

SEQ ID NO: 96119 - RNA, 20 nt, Artificial Sequence
  LRRK2 RNA guide
gagcagggucaaggggagga

SEQ ID NO: 96120 - RNA, 20 nt, Artificial Sequence
  LRRK2 RNA guide
gagccgcaaacucccauauc

SEQ ID NO: 96121 - RNA, 20 nt, Artificial Sequence
  LRRK2 RNA guide
gagcgcgguaaucacuugaa

SEQ ID NO: 96122 - RNA, 20 nt, Artificial Sequence
  LRRK2 RNA guide
gagcgcuggcugcgggcggu

SEQ ID NO: 96123 - RNA, 20 nt, Artificial Sequence
  LRRK2 RNA guide
gagcugagcucgcccccggg

SEQ ID NO: 96124 - RNA, 20 nt, Artificial Sequence
  LRRK2 RNA guide
gaggaaacucugaagaaguu

SEQ ID NO: 96125 - RNA, 20 nt, Artificial Sequence
  LRRK2 RNA guide
gaggacaaaauuugcaaaug

SEQ ID NO: 96126 - RNA, 20 nt, Artificial Sequence
  LRRK2 RNA guide
gaggacgaggaaacucugaa

SEQ ID NO: 96127 - RNA, 20 nt, Artificial Sequence
  LRRK2 RNA guide
gaggaggacaaaauuugcaa

SEQ ID NO: 96128 - RNA, 20 nt, Artificial Sequence
  LRRK2 RNA guide
gaggaucugcugguguucac

SEQ ID NO: 96129 - RNA, 20 nt, Artificial Sequence
  LRRK2 RNA guide
gagggcggcggguuggaagc

SEQ ID NO: 96130 - RNA, 20 nt, Artificial Sequence
  LRRK2 RNA guide
gagggggagaaaguuugcaa

SEQ ID NO: 96131 - RNA, 20 nt, Artificial Sequence
  LRRK2 RNA guide
gaguacgugaacaccagcag

SEQ ID NO: 96132 - RNA, 20 nt, Artificial Sequence
  LRRK2 RNA guide
gaguccggguuugagcaggg

SEQ ID NO: 96133 - RNA, 20 nt, Artificial Sequence
  LRRK2 RNA guide
gaguuuccucguccucuucg

SEQ ID NO: 96134 - RNA, 20 nt, Artificial Sequence
  LRRK2 RNA guide
gaguuugcggcuccuuaaga

SEQ ID NO: 96135 - RNA, 20 nt, Artificial Sequence
  LRRK2 RNA guide
gauagaaacgcugguccaaa

SEQ ID NO: 96136 - RNA, 20 nt, Artificial Sequence
  LRRK2 RNA guide
gauagucaggcugaacaaug

SEQ ID NO: 96137 - RNA, 20 nt, Artificial Sequence
  LRRK2 RNA guide
gauaugggaguuugcggcuc

SEQ ID NO: 96138 - RNA, 20 nt, Artificial Sequence
  LRRK2 RNA guide
gaucugcugguguucacgua

SEQ ID NO: 96139 - RNA, 20 nt, Artificial Sequence
  LRRK2 RNA guide
gauuaccgcgcucggaguac

SEQ ID NO: 96140 - RNA, 20 nt, Artificial Sequence
  LRRK2 RNA guide
gauuuggaccagcguuucua

SEQ ID NO: 96141 - RNA, 20 nt, Artificial Sequence
  LRRK2 RNA guide
gcaaacucccauauccuuuc

SEQ ID NO: 96142 - RNA, 20 nt, Artificial Sequence
  LRRK2 RNA guide
gcaaacuuucucccccuccu

SEQ ID NO: 96143 - RNA, 20 nt, Artificial Sequence
  LRRK2 RNA guide
gcaaauguaaggagggggag

SEQ ID NO: 96144 - RNA, 20 nt, Artificial Sequence
  LRRK2 RNA guide
gcaaauuuuguccuccuccc

SEQ ID NO: 96145 - RNA, 20 nt, Artificial Sequence
  LRRK2 RNA guide
gcacaguuuauuuucaagug

SEQ ID NO: 96146 - RNA, 20 nt, Artificial Sequence
  LRRK2 RNA guide
gcaccccugacagcugccac

SEQ ID NO: 96147 - RNA, 20 nt, Artificial Sequence
  LRRK2 RNA guide
gcaccugcuuccaacccgcc

SEQ ID NO: 96148 - RNA, 20 nt, Artificial Sequence
  LRRK2 RNA guide
gcagaaagcagcugagaauu

SEQ ID NO: 96149 - RNA, 20 nt, Artificial Sequence
  LRRK2 RNA guide
gcagauccuccaggauuugg

SEQ ID NO: 96150 - RNA, 20 nt, Artificial Sequence
  LRRK2 RNA guide
gcagcggacguucaugcugg

SEQ ID NO: 96151 - RNA, 20 nt, Artificial Sequence
  LRRK2 RNA guide
gcagcugagaauuucaggaa

SEQ ID NO: 96152 - RNA, 20 nt, Artificial Sequence
  LRRK2 RNA guide
gcagcugucaggggugcgaa

SEQ ID NO: 96153 - RNA, 20 nt, Artificial Sequence
  LRRK2 RNA guide
gcagggucaaggggaggagg

SEQ ID NO: 96154 - RNA, 20 nt, Artificial Sequence
  LRRK2 RNA guide
gcaggugccaccauggcuag

SEQ ID NO: 96155 - RNA, 20 nt, Artificial Sequence
  LRRK2 RNA guide
gccacagcuccccgggggcg

SEQ ID NO: 96156 - RNA, 20 nt, Artificial Sequence
  LRRK2 RNA guide
gccaccauggcuaguggcag

SEQ ID NO: 96157 - RNA, 20 nt, Artificial Sequence
  LRRK2 RNA guide
gccacuagccaugguggcac

SEQ ID NO: 96158 - RNA, 20 nt, Artificial Sequence
  LRRK2 RNA guide
gccaugguggcaccugcuuc

SEQ ID NO: 96159 - RNA, 20 nt, Artificial Sequence
  LRRK2 RNA guide
gccccugccgguucccugag

SEQ ID NO: 96160 - RNA, 20 nt, Artificial Sequence
  LRRK2 RNA guide
gcccuaaggaaaggauaugg

SEQ ID NO: 96161 - RNA, 20 nt, Artificial Sequence
  LRRK2 RNA guide
gcccucccagcaugaacguc

SEQ ID NO: 96162 - RNA, 20 nt, Artificial Sequence
  LRRK2 RNA guide
gccgcaaacucccauauccu

SEQ ID NO: 96163 - RNA, 20 nt, Artificial Sequence
  LRRK2 RNA guide
gccggcgccccugccgguuc

SEQ ID NO: 96164 - RNA, 20 nt, Artificial Sequence
  LRRK2 RNA guide
gccgguucccugagcagcgg

SEQ ID NO: 96165 - RNA, 20 nt, Artificial Sequence
  LRRK2 RNA guide
gcgaagaggacgaggaaacu

SEQ ID NO: 96166 - RNA, 20 nt, Artificial Sequence
  LRRK2 RNA guide
gcgagcucagcucaccgccc

SEQ ID NO: 96167 - RNA, 20 nt, Artificial Sequence
  LRRK2 RNA guide
gcgccccugccgguucccug

SEQ ID NO: 96168 - RNA, 20 nt, Artificial Sequence
  LRRK2 RNA guide
gcgcgguaaucacuugaaaa

SEQ ID NO: 96169 - RNA, 20 nt, Artificial Sequence
  LRRK2 RNA guide
gcgcucggaguacgugaaca

SEQ ID NO: 96170 - RNA, 20 nt, Artificial Sequence
  LRRK2 RNA guide
gcgcuggcugcgggcgguga

SEQ ID NO: 96171 - RNA, 20 nt, Artificial Sequence
  LRRK2 RNA guide
gcggacguucaugcugggag

SEQ ID NO: 96172 - RNA, 20 nt, Artificial Sequence
  LRRK2 RNA guide
gcggcggguuggaagcaggu

SEQ ID NO: 96173 - RNA, 20 nt, Artificial Sequence
  LRRK2 RNA guide
gcggcuccuuaagaguccgg

SEQ ID NO: 96174 - RNA, 20 nt, Artificial Sequence
  LRRK2 RNA guide
gcggguuggaagcaggugcc

SEQ ID NO: 96175 - RNA, 20 nt, Artificial Sequence
  LRRK2 RNA guide
gcgguaaucacuugaaaaua

SEQ ID NO: 96176 - RNA, 20 nt, Artificial Sequence
  LRRK2 RNA guide
gcggugagcugagcucgccc

SEQ ID NO: 96177 - RNA, 20 nt, Artificial Sequence
  LRRK2 RNA guide
gcguuucuaucuguuuuccu

SEQ ID NO: 96178 - RNA, 20 nt, Artificial Sequence
  LRRK2 RNA guide
gcucaaacccggacucuuaa

SEQ ID NO: 96179 - RNA, 20 nt, Artificial Sequence
  LRRK2 RNA guide
gcucaccgcccgcagccagc

SEQ ID NO: 96180 - RNA, 20 nt, Artificial Sequence
  LRRK2 RNA guide
gcucagcucaccgcccgcag

SEQ ID NO: 96181 - RNA, 20 nt, Artificial Sequence
  LRRK2 RNA guide
gcucagggaaccggcagggg

SEQ ID NO: 96182 - RNA, 20 nt, Artificial Sequence
  LRRK2 RNA guide
gcuccccgggggcgagcuca

SEQ ID NO: 96183 - RNA, 20 nt, Artificial Sequence
  LRRK2 RNA guide
gcuccuuaagaguccggguu

SEQ ID NO: 96184 - RNA, 20 nt, Artificial Sequence
  LRRK2 RNA guide
gcucggaguacgugaacacc

SEQ ID NO: 96185 - RNA, 20 nt, Artificial Sequence
  LRRK2 RNA guide
gcugaacaauguccaggaag

SEQ ID NO: 96186 - RNA, 20 nt, Artificial Sequence
  LRRK2 RNA guide
gcugagaauuucaggaaggu

SEQ ID NO: 96187 - RNA, 20 nt, Artificial Sequence
  LRRK2 RNA guide
gcugagcucgcccccgggga

SEQ ID NO: 96188 - RNA, 20 nt, Artificial Sequence
  LRRK2 RNA guide
gcugcuuucugcccuaagga

SEQ ID NO: 96189 - RNA, 20 nt, Artificial Sequence
  LRRK2 RNA guide
gcuggcugcgggcggugagc

SEQ ID NO: 96190 - RNA, 20 nt, Artificial Sequence
  LRRK2 RNA guide
gcugggagggcggcggguug

SEQ ID NO: 96191 - RNA, 20 nt, Artificial Sequence
  LRRK2 RNA guide
gcugguccaaauccuggagg

SEQ ID NO: 96192 - RNA, 20 nt, Artificial Sequence
  LRRK2 RNA guide
gcugguguucacguacuccg

SEQ ID NO: 96193 - RNA, 20 nt, Artificial Sequence
  LRRK2 RNA guide
gcugucaggggugcgaagag

SEQ ID NO: 96194 - RNA, 20 nt, Artificial Sequence
  LRRK2 RNA guide
gcuguggccggcgccccugc

SEQ ID NO: 96195 - RNA, 20 nt, Artificial Sequence
  LRRK2 RNA guide
gcuuccaacccgccgcccuc

SEQ ID NO: 96196 - RNA, 20 nt, Artificial Sequence
  LRRK2 RNA guide
gcuuucugcccuaaggaaag

SEQ ID NO: 96197 - RNA, 20 nt, Artificial Sequence
  LRRK2 RNA guide
gcuuuuauuuuugcaaacuu

SEQ ID NO: 96198 - RNA, 20 nt, Artificial Sequence
  LRRK2 RNA guide
ggaaaacagauagaaacgcu

SEQ ID NO: 96199 - RNA, 20 nt, Artificial Sequence
  LRRK2 RNA guide
ggaaacucugaagaaguuga

SEQ ID NO: 96200 - RNA, 20 nt, Artificial Sequence
  LRRK2 RNA guide
ggaaaggauaugggaguuug

SEQ ID NO: 96201 - RNA, 20 nt, Artificial Sequence
  LRRK2 RNA guide
ggaaccggcaggggcgccgg

SEQ ID NO: 96202 - RNA, 20 nt, Artificial Sequence
  LRRK2 RNA guide
ggaagcaggugccaccaugg

SEQ ID NO: 96203 - RNA, 20 nt, Artificial Sequence
  LRRK2 RNA guide
ggaaggucuucaccuuuuug

SEQ ID NO: 96204 - RNA, 20 nt, Artificial Sequence
  LRRK2 RNA guide
ggacaaaauuugcaaaugua

SEQ ID NO: 96205 - RNA, 20 nt, Artificial Sequence
  LRRK2 RNA guide
ggacauuguucagccugacu

SEQ ID NO: 96206 - RNA, 20 nt, Artificial Sequence
  LRRK2 RNA guide
ggaccagcguuucuaucugu

SEQ ID NO: 96207 - RNA, 20 nt, Artificial Sequence
  LRRK2 RNA guide
ggacgaggaaacucugaaga

SEQ ID NO: 96208 - RNA, 20 nt, Artificial Sequence
  LRRK2 RNA guide
ggacguucaugcugggaggg

SEQ ID NO: 96209 - RNA, 20 nt, Artificial Sequence
  LRRK2 RNA guide
ggacucuuaaggagccgcaa

SEQ ID NO: 96210 - RNA, 20 nt, Artificial Sequence
  LRRK2 RNA guide
ggagaaaagucaaaaaggug

SEQ ID NO: 96211 - RNA, 20 nt, Artificial Sequence
  LRRK2 RNA guide
ggagaaaguuugcaaaaaua

SEQ ID NO: 96212 - RNA, 20 nt, Artificial Sequence
  LRRK2 RNA guide
ggagccgcaaacucccauau

SEQ ID NO: 96213 - RNA, 20 nt, Artificial Sequence
  LRRK2 RNA guide
ggagcgcuggcugcgggcgg

SEQ ID NO: 96214 - RNA, 20 nt, Artificial Sequence
  LRRK2 RNA guide
ggaggacaaaauuugcaaau

SEQ ID NO: 96215 - RNA, 20 nt, Artificial Sequence
  LRRK2 RNA guide
ggaggaggacaaaauuugca

SEQ ID NO: 96216 - RNA, 20 nt, Artificial Sequence
  LRRK2 RNA guide
ggaggaucugcugguguuca

SEQ ID NO: 96217 - RNA, 20 nt, Artificial Sequence
  LRRK2 RNA guide
ggagggcggcggguuggaag

SEQ ID NO: 96218 - RNA, 20 nt, Artificial Sequence
  LRRK2 RNA guide
ggagggggagaaaguuugca

SEQ ID NO: 96219 - RNA, 20 nt, Artificial Sequence
  LRRK2 RNA guide
ggaguacgugaacaccagca

SEQ ID NO: 96220 - RNA, 20 nt, Artificial Sequence
  LRRK2 RNA guide
ggaguuugcggcuccuuaag

SEQ ID NO: 96221 - RNA, 20 nt, Artificial Sequence
  LRRK2 RNA guide
ggauaugggaguuugcggcu

SEQ ID NO: 96222 - RNA, 20 nt, Artificial Sequence
  LRRK2 RNA guide
ggaucugcugguguucacgu

SEQ ID NO: 96223 - RNA, 20 nt, Artificial Sequence
  LRRK2 RNA guide
ggauuuggaccagcguuucu

SEQ ID NO: 96224 - RNA, 20 nt, Artificial Sequence
  LRRK2 RNA guide
ggcaccugcuuccaacccgc

SEQ ID NO: 96225 - RNA, 20 nt, Artificial Sequence
  LRRK2 RNA guide
ggcagaaagcagcugagaau

SEQ ID NO: 96226 - RNA, 20 nt, Artificial Sequence
  LRRK2 RNA guide
ggcagcugucaggggugcga

SEQ ID NO: 96227 - RNA, 20 nt, Artificial Sequence
  LRRK2 RNA guide
ggccacagcuccccgggggc

SEQ ID NO: 96228 - RNA, 20 nt, Artificial Sequence
  LRRK2 RNA guide
ggcgagcucagcucaccgcc

SEQ ID NO: 96229 - RNA, 20 nt, Artificial Sequence
  LRRK2 RNA guide
ggcgccccugccgguucccu

SEQ ID NO: 96230 - RNA, 20 nt, Artificial Sequence
  LRRK2 RNA guide
ggcggcggguuggaagcagg

SEQ ID NO: 96231 - RNA, 20 nt, Artificial Sequence
  LRRK2 RNA guide
ggcggguuggaagcaggugc

SEQ ID NO: 96232 - RNA, 20 nt, Artificial Sequence
  LRRK2 RNA guide
ggcggugagcugagcucgcc

SEQ ID NO: 96233 - RNA, 20 nt, Artificial Sequence
  LRRK2 RNA guide
ggcuaguggcagcugucagg

SEQ ID NO: 96234 - RNA, 20 nt, Artificial Sequence
  LRRK2 RNA guide
ggcuccuuaagaguccgggu

SEQ ID NO: 96235 - RNA, 20 nt, Artificial Sequence
  LRRK2 RNA guide
ggcugaacaauguccaggaa

SEQ ID NO: 96236 - RNA, 20 nt, Artificial Sequence
  LRRK2 RNA guide
ggcugcgggcggugagcuga

SEQ ID NO: 96237 - RNA, 20 nt, Artificial Sequence
  LRRK2 RNA guide
gggagaaaagucaaaaaggu

SEQ ID NO: 96238 - RNA, 20 nt, Artificial Sequence
  LRRK2 RNA guide
gggagaaaguuugcaaaaau

SEQ ID NO: 96239 - RNA, 20 nt, Artificial Sequence
  LRRK2 RNA guide
gggagcgcuggcugcgggcg

SEQ ID NO: 96240 - RNA, 20 nt, Artificial Sequence
  LRRK2 RNA guide
gggaggaggacaaaauuugc

SEQ ID NO: 96241 - RNA, 20 nt, Artificial Sequence
  LRRK2 RNA guide
gggagggcggcggguuggaa

SEQ ID NO: 96242 - RNA, 20 nt, Artificial Sequence
  LRRK2 RNA guide
gggaguuugcggcuccuuaa

SEQ ID NO: 96243 - RNA, 20 nt, Artificial Sequence
  LRRK2 RNA guide
gggcagaaagcagcugagaa

SEQ ID NO: 96244 - RNA, 20 nt, Artificial Sequence
  LRRK2 RNA guide
gggcgagcucagcucaccgc

SEQ ID NO: 96245 - RNA, 20 nt, Artificial Sequence
  LRRK2 RNA guide
gggcggcggguuggaagcag

SEQ ID NO: 96246 - RNA, 20 nt, Artificial Sequence
  LRRK2 RNA guide
gggcggugagcugagcucgc

SEQ ID NO: 96247 - RNA, 20 nt, Artificial Sequence
  LRRK2 RNA guide
ggggagaaaagucaaaaagg

SEQ ID NO: 96248 - RNA, 20 nt, Artificial Sequence
  LRRK2 RNA guide
ggggagaaaguuugcaaaaa

SEQ ID NO: 96249 - RNA, 20 nt, Artificial Sequence
  LRRK2 RNA guide
ggggagcgcuggcugcgggc

SEQ ID NO: 96250 - RNA, 20 nt, Artificial Sequence
  LRRK2 RNA guide
ggggaggaggacaaaauuug

SEQ ID NO: 96251 - RNA, 20 nt, Artificial Sequence
  LRRK2 RNA guide
ggggcgagcucagcucaccg

SEQ ID NO: 96252 - RNA, 20 nt, Artificial Sequence
  LRRK2 RNA guide
gggggagaaaguuugcaaaa

SEQ ID NO: 96253 - RNA, 20 nt, Artificial Sequence
  LRRK2 RNA guide
gggggcgagcucagcucacc

SEQ ID NO: 96254 - RNA, 20 nt, Artificial Sequence
  LRRK2 RNA guide
ggggugcgaagaggacgagg

SEQ ID NO: 96255 - RNA, 20 nt, Artificial Sequence
  LRRK2 RNA guide
gggucaaggggaggaggaca

SEQ ID NO: 96256 - RNA, 20 nt, Artificial Sequence
  LRRK2 RNA guide
gggugcgaagaggacgagga

SEQ ID NO: 96257 - RNA, 20 nt, Artificial Sequence
  LRRK2 RNA guide
ggguuggaagcaggugccac

SEQ ID NO: 96258 - RNA, 20 nt, Artificial Sequence
  LRRK2 RNA guide
ggguuugagcagggucaagg

SEQ ID NO: 96259 - RNA, 20 nt, Artificial Sequence
  LRRK2 RNA guide
gguaaucacuugaaaauaaa

SEQ ID NO: 96260 - RNA, 20 nt, Artificial Sequence
  LRRK2 RNA guide
ggucaaggggaggaggacaa

SEQ ID NO: 96261 - RNA, 20 nt, Artificial Sequence
  LRRK2 RNA guide
gguccaaauccuggaggauc

SEQ ID NO: 96262 - RNA, 20 nt, Artificial Sequence
  LRRK2 RNA guide
ggucuucaccuuuuugacuu

SEQ ID NO: 96263 - RNA, 20 nt, Artificial Sequence
  LRRK2 RNA guide
ggugaagaccuuccugaaau

SEQ ID NO: 96264 - RNA, 20 nt, Artificial Sequence
  LRRK2 RNA guide
ggugagcugagcucgccccc

SEQ ID NO: 96265 - RNA, 20 nt, Artificial Sequence
  LRRK2 RNA guide
ggugccaccauggcuagugg

SEQ ID NO: 96266 - RNA, 20 nt, Artificial Sequence
  LRRK2 RNA guide
ggugcgaagaggacgaggaa

SEQ ID NO: 96267 - RNA, 20 nt, Artificial Sequence
  LRRK2 RNA guide
gguggcaccugcuuccaacc

SEQ ID NO: 96268 - RNA, 20 nt, Artificial Sequence
  LRRK2 RNA guide
gguguucacguacuccgagc

SEQ ID NO: 96269 - RNA, 20 nt, Artificial Sequence
  LRRK2 RNA guide
gguucccugagcagcggacg

SEQ ID NO: 96270 - RNA, 20 nt, Artificial Sequence
  LRRK2 RNA guide
gguuggaagcaggugccacc

SEQ ID NO: 96271 - RNA, 20 nt, Artificial Sequence
  LRRK2 RNA guide
gguuugagcagggucaaggg

SEQ ID NO: 96272 - RNA, 20 nt, Artificial Sequence
  LRRK2 RNA guide
guaaggagggggagaaaguu

SEQ ID NO: 96273 - RNA, 20 nt, Artificial Sequence
  LRRK2 RNA guide
guaaucacuugaaaauaaac

SEQ ID NO: 96274 - RNA, 20 nt, Artificial Sequence
  LRRK2 RNA guide
guacgugaacaccagcagau

SEQ ID NO: 96275 - RNA, 20 nt, Artificial Sequence
  LRRK2 RNA guide
guacuccgagcgcgguaauc

SEQ ID NO: 96276 - RNA, 20 nt, Artificial Sequence
  LRRK2 RNA guide
gucaaaaaggugaagaccuu

SEQ ID NO: 96277 - RNA, 20 nt, Artificial Sequence
  LRRK2 RNA guide
gucaaggggaggaggacaaa

SEQ ID NO: 96278 - RNA, 20 nt, Artificial Sequence
  LRRK2 RNA guide
gucaggcugaacaaugucca

SEQ ID NO: 96279 - RNA, 20 nt, Artificial Sequence
  LRRK2 RNA guide
gucaggggugcgaagaggac

SEQ ID NO: 96280 - RNA, 20 nt, Artificial Sequence
  LRRK2 RNA guide
guccaaauccuggaggaucu

SEQ ID NO: 96281 - RNA, 20 nt, Artificial Sequence
  LRRK2 RNA guide
guccaggaaggaaaacagau

SEQ ID NO: 96282 - RNA, 20 nt, Artificial Sequence
  LRRK2 RNA guide
guccgcugcucagggaaccg

SEQ ID NO: 96283 - RNA, 20 nt, Artificial Sequence
  LRRK2 RNA guide
guccggguuugagcaggguc

SEQ ID NO: 96284 - RNA, 20 nt, Artificial Sequence
  LRRK2 RNA guide
guccuccuccccuugacccu

SEQ ID NO: 96285 - RNA, 20 nt, Artificial Sequence
  LRRK2 RNA guide
guccucuucgcaccccugac

SEQ ID NO: 96286 - RNA, 20 nt, Artificial Sequence
  LRRK2 RNA guide
gucugaaacggggagaaaag

SEQ ID NO: 96287 - RNA, 20 nt, Artificial Sequence
  LRRK2 RNA guide
gucuucaccuuuuugacuuu

SEQ ID NO: 96288 - RNA, 20 nt, Artificial Sequence
  LRRK2 RNA guide
gugaacaccagcagauccuc

SEQ ID NO: 96289 - RNA, 20 nt, Artificial Sequence
  LRRK2 RNA guide
gugaagaccuuccugaaauu

SEQ ID NO: 96290 - RNA, 20 nt, Artificial Sequence
  LRRK2 RNA guide
gugagcugagcucgcccccg

SEQ ID NO: 96291 - RNA, 20 nt, Artificial Sequence
  LRRK2 RNA guide
gugauuaccgcgcucggagu

SEQ ID NO: 96292 - RNA, 20 nt, Artificial Sequence
  LRRK2 RNA guide
gugccaccauggcuaguggc

SEQ ID NO: 96293 - RNA, 20 nt, Artificial Sequence
  LRRK2 RNA guide
gugcgaagaggacgaggaaa

SEQ ID NO: 96294 - RNA, 20 nt, Artificial Sequence
  LRRK2 RNA guide
guggcaccugcuuccaaccc

SEQ ID NO: 96295 - RNA, 20 nt, Artificial Sequence
  LRRK2 RNA guide
guguucacguacuccgagcg

SEQ ID NO: 96296 - RNA, 20 nt, Artificial Sequence
  LRRK2 RNA guide
guucacguacuccgagcgcg

SEQ ID NO: 96297 - RNA, 20 nt, Artificial Sequence
  LRRK2 RNA guide
guucagccugacuaucaacu

SEQ ID NO: 96298 - RNA, 20 nt, Artificial Sequence
  LRRK2 RNA guide
guucaugcugggagggcggc

SEQ ID NO: 96299 - RNA, 20 nt, Artificial Sequence
  LRRK2 RNA guide
guucccugagcagcggacgu

SEQ ID NO: 96300 - RNA, 20 nt, Artificial Sequence
  LRRK2 RNA guide
guugauagucaggcugaaca

SEQ ID NO: 96301 - RNA, 20 nt, Artificial Sequence
  LRRK2 RNA guide
guuggaagcaggugccacca

SEQ ID NO: 96302 - RNA, 20 nt, Artificial Sequence
  LRRK2 RNA guide
guuuauuuucaagugauuac

SEQ ID NO: 96303 - RNA, 20 nt, Artificial Sequence
  LRRK2 RNA guide
guuuccucguccucuucgca

SEQ ID NO: 96304 - RNA, 20 nt, Artificial Sequence
  LRRK2 RNA guide
guuugagcagggucaagggg

SEQ ID NO: 96305 - RNA, 20 nt, Artificial Sequence
  LRRK2 RNA guide
guuugcggcuccuuaagagu

SEQ ID NO: 96306 - RNA, 20 nt, Artificial Sequence
  LRRK2 RNA guide
guuuuccuuccuggacauug

SEQ ID NO: 96307 - RNA, 20 nt, Artificial Sequence
  LRRK2 RNA guide
uaagaguccggguuugagca

SEQ ID NO: 96308 - RNA, 20 nt, Artificial Sequence
  LRRK2 RNA guide
uaaggaaaggauaugggagu

SEQ ID NO: 96309 - RNA, 20 nt, Artificial Sequence
  LRRK2 RNA guide
uaaggagccgcaaacuccca

SEQ ID NO: 96310 - RNA, 20 nt, Artificial Sequence
  LRRK2 RNA guide
uaaggagggggagaaaguuu

SEQ ID NO: 96311 - RNA, 20 nt, Artificial Sequence
  LRRK2 RNA guide
uacauuugcaaauuuugucc

SEQ ID NO: 96312 - RNA, 20 nt, Artificial Sequence
  LRRK2 RNA guide
uaccgcgcucggaguacgug

SEQ ID NO: 96313 - RNA, 20 nt, Artificial Sequence
  LRRK2 RNA guide
uacgugaacaccagcagauc

SEQ ID NO: 96314 - RNA, 20 nt, Artificial Sequence
  LRRK2 RNA guide
uacuccgagcgcgguaauca

SEQ ID NO: 96315 - RNA, 20 nt, Artificial Sequence
  LRRK2 RNA guide
uagaaacgcugguccaaauc

SEQ ID NO: 96316 - RNA, 20 nt, Artificial Sequence
  LRRK2 RNA guide
uagggcagaaagcagcugag

SEQ ID NO: 96317 - RNA, 20 nt, Artificial Sequence
  LRRK2 RNA guide
uagucaggcugaacaauguc

SEQ ID NO: 96318 - RNA, 20 nt, Artificial Sequence
  LRRK2 RNA guide
uagucugaaacggggagaaa

SEQ ID NO: 96319 - RNA, 20 nt, Artificial Sequence
  LRRK2 RNA guide
uaucaacuucuucagaguuu

SEQ ID NO: 96320 - RNA, 20 nt, Artificial Sequence
  LRRK2 RNA guide
uauccuuuccuuagggcaga

SEQ ID NO: 96321 - RNA, 20 nt, Artificial Sequence
  LRRK2 RNA guide
uaugggaguuugcggcuccu

SEQ ID NO: 96322 - RNA, 20 nt, Artificial Sequence
  LRRK2 RNA guide
uauuuucaagugauuaccgc

SEQ ID NO: 96323 - RNA, 20 nt, Artificial Sequence
  LRRK2 RNA guide
uauuuuugcaaacuuucucc

SEQ ID NO: 96324 - RNA, 20 nt, Artificial Sequence
  LRRK2 RNA guide
ucaaaaaggugaagaccuuc

SEQ ID NO: 96325 - RNA, 20 nt, Artificial Sequence
  LRRK2 RNA guide
ucaaacccggacucuuaagg

SEQ ID NO: 96326 - RNA, 20 nt, Artificial Sequence
  LRRK2 RNA guide
ucaacuucuucagaguuucc

SEQ ID NO: 96327 - RNA, 20 nt, Artificial Sequence
  LRRK2 RNA guide
ucaaggggaggaggacaaaa

SEQ ID NO: 96328 - RNA, 20 nt, Artificial Sequence
  LRRK2 RNA guide
ucaagugauuaccgcgcucg

SEQ ID NO: 96329 - RNA, 20 nt, Artificial Sequence
  LRRK2 RNA guide
ucaccuuuuugacuuuucuc

SEQ ID NO: 96330 - RNA, 20 nt, Artificial Sequence
  LRRK2 RNA guide
ucacguacuccgagcgcggu

SEQ ID NO: 96331 - RNA, 20 nt, Artificial Sequence
  LRRK2 RNA guide
ucagccugacuaucaacuuc

SEQ ID NO: 96332 - RNA, 20 nt, Artificial Sequence
  LRRK2 RNA guide
ucagcucaccgcccgcagcc

SEQ ID NO: 96333 - RNA, 20 nt, Artificial Sequence
  LRRK2 RNA guide
ucagcugcuuucugcccuaa

SEQ ID NO: 96334 - RNA, 20 nt, Artificial Sequence
  LRRK2 RNA guide
ucaggaaggucuucaccuuu

SEQ ID NO: 96335 - RNA, 20 nt, Artificial Sequence
  LRRK2 RNA guide
ucaggcugaacaauguccag

SEQ ID NO: 96336 - RNA, 20 nt, Artificial Sequence
  LRRK2 RNA guide
ucaggggugcgaagaggacg

SEQ ID NO: 96337 - RNA, 20 nt, Artificial Sequence
  LRRK2 RNA guide
ucaugcugggagggcggcgg

SEQ ID NO: 96338 - RNA, 20 nt, Artificial Sequence
  LRRK2 RNA guide
uccaaauccuggaggaucug

SEQ ID NO: 96339 - RNA, 20 nt, Artificial Sequence
  LRRK2 RNA guide
uccaggaaggaaaacagaua

SEQ ID NO: 96340 - RNA, 20 nt, Artificial Sequence
  LRRK2 RNA guide
uccaggauuuggaccagcgu

SEQ ID NO: 96341 - RNA, 20 nt, Artificial Sequence
  LRRK2 RNA guide
ucccagcaugaacguccgcu

SEQ ID NO: 96342 - RNA, 20 nt, Artificial Sequence
  LRRK2 RNA guide
ucccauauccuuuccuuagg

SEQ ID NO: 96343 - RNA, 20 nt, Artificial Sequence
  LRRK2 RNA guide
ucccccuccuuacauuugca

SEQ ID NO: 96344 - RNA, 20 nt, Artificial Sequence
  LRRK2 RNA guide
uccccgggggcgagcucagc

SEQ ID NO: 96345 - RNA, 20 nt, Artificial Sequence
  LRRK2 RNA guide
uccccuugacccugcucaaa

SEQ ID NO: 96346 - RNA, 20 nt, Artificial Sequence
  LRRK2 RNA guide
ucccugagcagcggacguuc

SEQ ID NO: 96347 - RNA, 20 nt, Artificial Sequence
  LRRK2 RNA guide
uccgagcgcgguaaucacuu

SEQ ID NO: 96348 - RNA, 20 nt, Artificial Sequence
  LRRK2 RNA guide
uccggguuugagcaggguca

SEQ ID NO: 96349 - RNA, 20 nt, Artificial Sequence
  LRRK2 RNA guide
uccuccccuugacccugcuc

SEQ ID NO: 96350 - RNA, 20 nt, Artificial Sequence
  LRRK2 RNA guide
uccuccuccccuugacccug

SEQ ID NO: 96351 - RNA, 20 nt, Artificial Sequence
  LRRK2 RNA guide
uccucguccucuucgcaccc

SEQ ID NO: 96352 - RNA, 20 nt, Artificial Sequence
  LRRK2 RNA guide
uccucuucgcaccccugaca

SEQ ID NO: 96353 - RNA, 20 nt, Artificial Sequence
  LRRK2 RNA guide
uccugaaauucucagcugcu

SEQ ID NO: 96354 - RNA, 20 nt, Artificial Sequence
  LRRK2 RNA guide
uccuggaggaucugcuggug

SEQ ID NO: 96355 - RNA, 20 nt, Artificial Sequence
  LRRK2 RNA guide
uccuuaagaguccggguuug

SEQ ID NO: 96356 - RNA, 20 nt, Artificial Sequence
  LRRK2 RNA guide
uccuuacauuugcaaauuuu

SEQ ID NO: 96357 - RNA, 20 nt, Artificial Sequence
  LRRK2 RNA guide
uccuuagggcagaaagcagc

SEQ ID NO: 96358 - RNA, 20 nt, Artificial Sequence
  LRRK2 RNA guide
uccuuccuggacauuguuca

SEQ ID NO: 96359 - RNA, 20 nt, Artificial Sequence
  LRRK2 RNA guide
uccuuuccuuagggcagaaa

SEQ ID NO: 96360 - RNA, 20 nt, Artificial Sequence
  LRRK2 RNA guide
ucgcaccccugacagcugcc

SEQ ID NO: 96361 - RNA, 20 nt, Artificial Sequence
  LRRK2 RNA guide
ucggaguacgugaacaccag

SEQ ID NO: 96362 - RNA, 20 nt, Artificial Sequence
  LRRK2 RNA guide
ucguccucuucgcaccccug

SEQ ID NO: 96363 - RNA, 20 nt, Artificial Sequence
  LRRK2 RNA guide
ucucagcugcuuucugcccu

SEQ ID NO: 96364 - RNA, 20 nt, Artificial Sequence
  LRRK2 RNA guide
ucucccccuccuuacauuug

SEQ ID NO: 96365 - RNA, 20 nt, Artificial Sequence
  LRRK2 RNA guide
ucugaaacggggagaaaagu

SEQ ID NO: 96366 - RNA, 20 nt, Artificial Sequence
  LRRK2 RNA guide
ucugaagaaguugauaguca

SEQ ID NO: 96367 - RNA, 20 nt, Artificial Sequence
  LRRK2 RNA guide
ucugcccuaaggaaaggaua

SEQ ID NO: 96368 - RNA, 20 nt, Artificial Sequence
  LRRK2 RNA guide
ucugcugguguucacguacu

SEQ ID NO: 96369 - RNA, 20 nt, Artificial Sequence
  LRRK2 RNA guide
ucuguuuuccuuccuggaca

SEQ ID NO: 96370 - RNA, 20 nt, Artificial Sequence
  LRRK2 RNA guide
ucuuaaggagccgcaaacuc

SEQ ID NO: 96371 - RNA, 20 nt, Artificial Sequence
  LRRK2 RNA guide
ucuucaccuuuuugacuuuu

SEQ ID NO: 96372 - RNA, 20 nt, Artificial Sequence
  LRRK2 RNA guide
ucuucgcaccccugacagcu

SEQ ID NO: 96373 - RNA, 20 nt, Artificial Sequence
  LRRK2 RNA guide
ugaaacggggagaaaaguca

SEQ ID NO: 96374 - RNA, 20 nt, Artificial Sequence
  LRRK2 RNA guide
ugaaauucucagcugcuuuc

SEQ ID NO: 96375 - RNA, 20 nt, Artificial Sequence
  LRRK2 RNA guide
ugaacaauguccaggaagga

SEQ ID NO: 96376 - RNA, 20 nt, Artificial Sequence
  LRRK2 RNA guide
ugaacaccagcagauccucc

SEQ ID NO: 96377 - RNA, 20 nt, Artificial Sequence
  LRRK2 RNA guide
ugaacguccgcugcucaggg

SEQ ID NO: 96378 - RNA, 20 nt, Artificial Sequence
  LRRK2 RNA guide
ugaagaaguugauagucagg

SEQ ID NO: 96379 - RNA, 20 nt, Artificial Sequence
  LRRK2 RNA guide
ugaagaccuuccugaaauuc

SEQ ID NO: 96380 - RNA, 20 nt, Artificial Sequence
  LRRK2 RNA guide
ugacagcugccacuagccau

SEQ ID NO: 96381 - RNA, 20 nt, Artificial Sequence
  LRRK2 RNA guide
ugacccugcucaaacccgga

SEQ ID NO: 96382 - RNA, 20 nt, Artificial Sequence
  LRRK2 RNA guide
ugacuuuucuccccguuuca

SEQ ID NO: 96383 - RNA, 20 nt, Artificial Sequence
  LRRK2 RNA guide
ugagaauuucaggaaggucu

SEQ ID NO: 96384 - RNA, 20 nt, Artificial Sequence
  LRRK2 RNA guide
ugagcagcggacguucaugc

SEQ ID NO: 96385 - RNA, 20 nt, Artificial Sequence
  LRRK2 RNA guide
ugagcagggucaaggggagg

SEQ ID NO: 96386 - RNA, 20 nt, Artificial Sequence
  LRRK2 RNA guide
ugagcucgcccccggggagc

SEQ ID NO: 96387 - RNA, 20 nt, Artificial Sequence
  LRRK2 RNA guide
ugagcugagcucgcccccgg

SEQ ID NO: 96388 - RNA, 20 nt, Artificial Sequence
  LRRK2 RNA guide
ugauagucaggcugaacaau

SEQ ID NO: 96389 - RNA, 20 nt, Artificial Sequence
  LRRK2 RNA guide
ugauuaccgcgcucggagua

SEQ ID NO: 96390 - RNA, 20 nt, Artificial Sequence
  LRRK2 RNA guide
ugcaaacuuucucccccucc

SEQ ID NO: 96391 - RNA, 20 nt, Artificial Sequence
  LRRK2 RNA guide
ugcaaauguaaggaggggga

SEQ ID NO: 96392 - RNA, 20 nt, Artificial Sequence
  LRRK2 RNA guide
ugcaaauuuuguccuccucc

SEQ ID NO: 96393 - RNA, 20 nt, Artificial Sequence
  LRRK2 RNA guide
ugccaccauggcuaguggca

SEQ ID NO: 96394 - RNA, 20 nt, Artificial Sequence
  LRRK2 RNA guide
ugccacuagccaugguggca

SEQ ID NO: 96395 - RNA, 20 nt, Artificial Sequence
  LRRK2 RNA guide
ugcccuaaggaaaggauaug

SEQ ID NO: 96396 - RNA, 20 nt, Artificial Sequence
  LRRK2 RNA guide
ugcgaagaggacgaggaaac

SEQ ID NO: 96397 - RNA, 20 nt, Artificial Sequence
  LRRK2 RNA guide
ugcggcuccuuaagaguccg

SEQ ID NO: 96398 - RNA, 20 nt, Artificial Sequence
  LRRK2 RNA guide
ugcucaaacccggacucuua

SEQ ID NO: 96399 - RNA, 20 nt, Artificial Sequence
  LRRK2 RNA guide
ugcucagggaaccggcaggg

SEQ ID NO: 96400 - RNA, 20 nt, Artificial Sequence
  LRRK2 RNA guide
ugcugggagggcggcggguu

SEQ ID NO: 96401 - RNA, 20 nt, Artificial Sequence
  LRRK2 RNA guide
ugcugguguucacguacucc

SEQ ID NO: 96402 - RNA, 20 nt, Artificial Sequence
  LRRK2 RNA guide
ugcuuccaacccgccgcccu

SEQ ID NO: 96403 - RNA, 20 nt, Artificial Sequence
  LRRK2 RNA guide
ugcuuucugcccuaaggaaa

SEQ ID NO: 96404 - RNA, 20 nt, Artificial Sequence
  LRRK2 RNA guide
uggaagcaggugccaccaug

SEQ ID NO: 96405 - RNA, 20 nt, Artificial Sequence
  LRRK2 RNA guide
uggacauuguucagccugac

SEQ ID NO: 96406 - RNA, 20 nt, Artificial Sequence
  LRRK2 RNA guide
uggaccagcguuucuaucug

SEQ ID NO: 96407 - RNA, 20 nt, Artificial Sequence
  LRRK2 RNA guide
uggaggaucugcugguguuc

SEQ ID NO: 96408 - RNA, 20 nt, Artificial Sequence
  LRRK2 RNA guide
uggcagcugucaggggugcg

SEQ ID NO: 96409 - RNA, 20 nt, Artificial Sequence
  LRRK2 RNA guide
uggccggcgccccugccggu

SEQ ID NO: 96410 - RNA, 20 nt, Artificial Sequence
  LRRK2 RNA guide
uggcuaguggcagcugucag

SEQ ID NO: 96411 - RNA, 20 nt, Artificial Sequence
  LRRK2 RNA guide
uggcugcgggcggugagcug

SEQ ID NO: 96412 - RNA, 20 nt, Artificial Sequence
  LRRK2 RNA guide
ugggagggcggcggguugga

SEQ ID NO: 96413 - RNA, 20 nt, Artificial Sequence
  LRRK2 RNA guide
ugggaguuugcggcuccuua

SEQ ID NO: 96414 - RNA, 20 nt, Artificial Sequence
  LRRK2 RNA guide
ugguccaaauccuggaggau

SEQ ID NO: 96415 - RNA, 20 nt, Artificial Sequence
  LRRK2 RNA guide
ugguggcaccugcuuccaac

SEQ ID NO: 96416 - RNA, 20 nt, Artificial Sequence
  LRRK2 RNA guide
ugguguucacguacuccgag

SEQ ID NO: 96417 - RNA, 20 nt, Artificial Sequence
  LRRK2 RNA guide
uguaaggagggggagaaagu

SEQ ID NO: 96418 - RNA, 20 nt, Artificial Sequence
  LRRK2 RNA guide
ugucaggggugcgaagagga

SEQ ID NO: 96419 - RNA, 20 nt, Artificial Sequence
  LRRK2 RNA guide
uguccaggaaggaaaacaga

SEQ ID NO: 96420 - RNA, 20 nt, Artificial Sequence
  LRRK2 RNA guide
uguccuccuccccuugaccc

SEQ ID NO: 96421 - RNA, 20 nt, Artificial Sequence
  LRRK2 RNA guide
uguggccggcgccccugccg

SEQ ID NO: 96422 - RNA, 20 nt, Artificial Sequence
  LRRK2 RNA guide
uguucacguacuccgagcgc

SEQ ID NO: 96423 - RNA, 20 nt, Artificial Sequence
  LRRK2 RNA guide
uguucagccugacuaucaac

SEQ ID NO: 96424 - RNA, 20 nt, Artificial Sequence
  LRRK2 RNA guide
uguuuuccuuccuggacauu

SEQ ID NO: 96425 - RNA, 20 nt, Artificial Sequence
  LRRK2 RNA guide
uuaagaguccggguuugagc

SEQ ID NO: 96426 - RNA, 20 nt, Artificial Sequence
  LRRK2 RNA guide
uuaaggagccgcaaacuccc

SEQ ID NO: 96427 - RNA, 20 nt, Artificial Sequence
  LRRK2 RNA guide
uuacauuugcaaauuuuguc

SEQ ID NO: 96428 - RNA, 20 nt, Artificial Sequence
  LRRK2 RNA guide
uuaccgcgcucggaguacgu

SEQ ID NO: 96429 - RNA, 20 nt, Artificial Sequence
  LRRK2 RNA guide
uuagggcagaaagcagcuga

SEQ ID NO: 96430 - RNA, 20 nt, Artificial Sequence
  LRRK2 RNA guide
uuagucugaaacggggagaa

SEQ ID NO: 96431 - RNA, 20 nt, Artificial Sequence
  LRRK2 RNA guide
uuauuuucaagugauuaccg

SEQ ID NO: 96432 - RNA, 20 nt, Artificial Sequence
  LRRK2 RNA guide
uuauuuuugcaaacuuucuc

SEQ ID NO: 96433 - RNA, 20 nt, Artificial Sequence
  LRRK2 RNA guide
uucaagugauuaccgcgcuc

SEQ ID NO: 96434 - RNA, 20 nt, Artificial Sequence
  LRRK2 RNA guide
uucaccuuuuugacuuuucu

SEQ ID NO: 96435 - RNA, 20 nt, Artificial Sequence
  LRRK2 RNA guide
uucacguacuccgagcgcgg

SEQ ID NO: 96436 - RNA, 20 nt, Artificial Sequence
  LRRK2 RNA guide
uucaggaaggucuucaccuu

SEQ ID NO: 96437 - RNA, 20 nt, Artificial Sequence
  LRRK2 RNA guide
uucaugcugggagggcggcg

SEQ ID NO: 96438 - RNA, 20 nt, Artificial Sequence
  LRRK2 RNA guide
uuccaacccgccgcccuccc

SEQ ID NO: 96439 - RNA, 20 nt, Artificial Sequence
  LRRK2 RNA guide
uucccugagcagcggacguu

SEQ ID NO: 96440 - RNA, 20 nt, Artificial Sequence
  LRRK2 RNA guide
uuccucguccucuucgcacc

SEQ ID NO: 96441 - RNA, 20 nt, Artificial Sequence
  LRRK2 RNA guide
uuccugaaauucucagcugc

SEQ ID NO: 96442 - RNA, 20 nt, Artificial Sequence
  LRRK2 RNA guide
uuccuggacauuguucagcc

SEQ ID NO: 96443 - RNA, 20 nt, Artificial Sequence
  LRRK2 RNA guide
uuccuuagggcagaaagcag

SEQ ID NO: 96444 - RNA, 20 nt, Artificial Sequence
  LRRK2 RNA guide
uuccuuccuggacauuguuc

SEQ ID NO: 96445 - RNA, 20 nt, Artificial Sequence
  LRRK2 RNA guide
uucgcaccccugacagcugc

SEQ ID NO: 96446 - RNA, 20 nt, Artificial Sequence
  LRRK2 RNA guide
uucucagcugcuuucugccc

SEQ ID NO: 96447 - RNA, 20 nt, Artificial Sequence
  LRRK2 RNA guide
uucucccccuccuuacauuu

SEQ ID NO: 96448 - RNA, 20 nt, Artificial Sequence
  LRRK2 RNA guide
uucugcccuaaggaaaggau

SEQ ID NO: 96449 - RNA, 20 nt, Artificial Sequence
  LRRK2 RNA guide
uucuucagaguuuccucguc

SEQ ID NO: 96450 - RNA, 20 nt, Artificial Sequence
  LRRK2 RNA guide
uugacccugcucaaacccgg

SEQ ID NO: 96451 - RNA, 20 nt, Artificial Sequence
  LRRK2 RNA guide
uugacuuuucuccccguuuc

SEQ ID NO: 96452 - RNA, 20 nt, Artificial Sequence
  LRRK2 RNA guide
uugagcagggucaaggggag

SEQ ID NO: 96453 - RNA, 20 nt, Artificial Sequence
  LRRK2 RNA guide
uugauagucaggcugaacaa

SEQ ID NO: 96454 - RNA, 20 nt, Artificial Sequence
  LRRK2 RNA guide
uugcaaacuuucucccccuc

SEQ ID NO: 96455 - RNA, 20 nt, Artificial Sequence
  LRRK2 RNA guide
uugcaaauguaaggaggggg

SEQ ID NO: 96456 - RNA, 20 nt, Artificial Sequence
  LRRK2 RNA guide
uugcaaauuuuguccuccuc

SEQ ID NO: 96457 - RNA, 20 nt, Artificial Sequence
  LRRK2 RNA guide
uugcggcuccuuaagagucc

SEQ ID NO: 96458 - RNA, 20 nt, Artificial Sequence
  LRRK2 RNA guide
uuggaagcaggugccaccau

SEQ ID NO: 96459 - RNA, 20 nt, Artificial Sequence
  LRRK2 RNA guide
uuggaccagcguuucuaucu

SEQ ID NO: 96460 - RNA, 20 nt, Artificial Sequence
  LRRK2 RNA guide
uuguccuccuccccuugacc

SEQ ID NO: 96461 - RNA, 20 nt, Artificial Sequence
  LRRK2 RNA guide
uuuagucugaaacggggaga

SEQ ID NO: 96462 - RNA, 20 nt, Artificial Sequence
  LRRK2 RNA guide
uuuauuuucaagugauuacc

SEQ ID NO: 96463 - RNA, 20 nt, Artificial Sequence
  LRRK2 RNA guide
uuuauuuuugcaaacuuucu

SEQ ID NO: 96464 - RNA, 20 nt, Artificial Sequence
  LRRK2 RNA guide
uuucaagugauuaccgcgcu

SEQ ID NO: 96465 - RNA, 20 nt, Artificial Sequence
  LRRK2 RNA guide
uuucaggaaggucuucaccu

SEQ ID NO: 96466 - RNA, 20 nt, Artificial Sequence
  LRRK2 RNA guide
uuuccucguccucuucgcac

SEQ ID NO: 96467 - RNA, 20 nt, Artificial Sequence
  LRRK2 RNA guide
uuuccuuagggcagaaagca

SEQ ID NO: 96468 - RNA, 20 nt, Artificial Sequence
  LRRK2 RNA guide
uuucucccccuccuuacauu

SEQ ID NO: 96469 - RNA, 20 nt, Artificial Sequence
  LRRK2 RNA guide
uuucuccccguuucagacua

SEQ ID NO: 96470 - RNA, 20 nt, Artificial Sequence
  LRRK2 RNA guide
uuucugcccuaaggaaagga

SEQ ID NO: 96471 - RNA, 20 nt, Artificial Sequence
  LRRK2 RNA guide
uuugacuuuucuccccguuu

SEQ ID NO: 96472 - RNA, 20 nt, Artificial Sequence
  LRRK2 RNA guide
uuugagcagggucaagggga

SEQ ID NO: 96473 - RNA, 20 nt, Artificial Sequence
  LRRK2 RNA guide
uuugcaaacuuucucccccu

SEQ ID NO: 96474 - RNA, 20 nt, Artificial Sequence
  LRRK2 RNA guide
uuugcaaauguaaggagggg

SEQ ID NO: 96475 - RNA, 20 nt, Artificial Sequence
  LRRK2 RNA guide
uuugcaaauuuuguccuccu

SEQ ID NO: 96476 - RNA, 20 nt, Artificial Sequence
  LRRK2 RNA guide
uuugcggcuccuuaagaguc

SEQ ID NO: 96477 - RNA, 20 nt, Artificial Sequence
  LRRK2 RNA guide
uuuggaccagcguuucuauc

SEQ ID NO: 96478 - RNA, 20 nt, Artificial Sequence
  LRRK2 RNA guide
uuuguccuccuccccuugac

SEQ ID NO: 96479 - RNA, 20 nt, Artificial Sequence
  LRRK2 RNA guide
uuuuagucugaaacggggag

SEQ ID NO: 96480 - RNA, 20 nt, Artificial Sequence
  LRRK2 RNA guide
uuuuauuuuugcaaacuuuc

SEQ ID NO: 96481 - RNA, 20 nt, Artificial Sequence
  LRRK2 RNA guide
uuuucaagugauuaccgcgc

SEQ ID NO: 96482 - RNA, 20 nt, Artificial Sequence
  LRRK2 RNA guide
uuuuccuuccuggacauugu

SEQ ID NO: 96483 - RNA, 20 nt, Artificial Sequence
  LRRK2 RNA guide
uuuucuccccguuucagacu

SEQ ID NO: 96484 - RNA, 20 nt, Artificial Sequence
  LRRK2 RNA guide
uuuugacuuuucuccccguu

SEQ ID NO: 96485 - RNA, 20 nt, Artificial Sequence
  LRRK2 RNA guide
uuuugcaaacuuucuccccc

SEQ ID NO: 96486 - RNA, 20 nt, Artificial Sequence
  LRRK2 RNA guide
uuuuguccuccuccccuuga

SEQ ID NO: 96487 - RNA, 20 nt, Artificial Sequence
  LRRK2 RNA guide
uuuuuagucugaaacgggga

SEQ ID NO: 96488 - RNA, 20 nt, Artificial Sequence
  LRRK2 RNA guide
uuuuugacuuuucuccccgu

SEQ ID NO: 96489 - RNA, 20 nt, Artificial Sequence
  LRRK2 RNA guide
uuuuugcaaacuuucucccc

SEQ ID NO: 96490 - RNA, 21 nt, Artificial Sequence
  LRRK2 RNA guide
aaaaaggugaagaccuuccug

SEQ ID NO: 96491 - RNA, 21 nt, Artificial Sequence
  LRRK2 RNA guide
aaaacagauagaaacgcuggu

SEQ ID NO: 96492 - RNA, 21 nt, Artificial Sequence
  LRRK2 RNA guide
aaaaggugaagaccuuccuga

SEQ ID NO: 96493 - RNA, 21 nt, Artificial Sequence
  LRRK2 RNA guide
aaaagucaaaaaggugaagac

SEQ ID NO: 96494 - RNA, 21 nt, Artificial Sequence
  LRRK2 RNA guide
aaaauuugcaaauguaaggag

SEQ ID NO: 96495 - RNA, 21 nt, Artificial Sequence
  LRRK2 RNA guide
aaacagauagaaacgcugguc

SEQ ID NO: 96496 - RNA, 21 nt, Artificial Sequence
  LRRK2 RNA guide
aaacccggacucuuaaggagc

SEQ ID NO: 96497 - RNA, 21 nt, Artificial Sequence
  LRRK2 RNA guide
aaacgcugguccaaauccugg

SEQ ID NO: 96498 - RNA, 21 nt, Artificial Sequence
  LRRK2 RNA guide
aaacggggagaaaagucaaaa

SEQ ID NO: 96499 - RNA, 21 nt, Artificial Sequence
  LRRK2 RNA guide
aaacucccauauccuuuccuu

SEQ ID NO: 96500 - RNA, 21 nt, Artificial Sequence
  LRRK2 RNA guide
aaacucugaagaaguugauag

SEQ ID NO: 96501 - RNA, 21 nt, Artificial Sequence
  LRRK2 RNA guide
aaacuuucucccccuccuuac

SEQ ID NO: 96502 - RNA, 21 nt, Artificial Sequence
  LRRK2 RNA guide
aaagcagcugagaauuucagg

SEQ ID NO: 96503 - RNA, 21 nt, Artificial Sequence
  LRRK2 RNA guide
aaaggauaugggaguuugcgg

SEQ ID NO: 96504 - RNA, 21 nt, Artificial Sequence
  LRRK2 RNA guide
aaaggugaagaccuuccugaa

SEQ ID NO: 96505 - RNA, 21 nt, Artificial Sequence
  LRRK2 RNA guide
aaagucaaaaaggugaagacc

SEQ ID NO: 96506 - RNA, 21 nt, Artificial Sequence
  LRRK2 RNA guide
aaauccuggaggaucugcugg

SEQ ID NO: 96507 - RNA, 21 nt, Artificial Sequence
  LRRK2 RNA guide
aaauguaaggagggggagaaa

SEQ ID NO: 96508 - RNA, 21 nt, Artificial Sequence
  LRRK2 RNA guide
aaauucucagcugcuuucugc

SEQ ID NO: 96509 - RNA, 21 nt, Artificial Sequence
  LRRK2 RNA guide
aaauuugcaaauguaaggagg

SEQ ID NO: 96510 - RNA, 21 nt, Artificial Sequence
  LRRK2 RNA guide
aaauuuuguccuccuccccuu

SEQ ID NO: 96511 - RNA, 21 nt, Artificial Sequence
  LRRK2 RNA guide
aacaauguccaggaaggaaaa

SEQ ID NO: 96512 - RNA, 21 nt, Artificial Sequence
  LRRK2 RNA guide
aacaccagcagauccuccagg

SEQ ID NO: 96513 - RNA, 21 nt, Artificial Sequence
  LRRK2 RNA guide
aacagauagaaacgcuggucc

SEQ ID NO: 96514 - RNA, 21 nt, Artificial Sequence
  LRRK2 RNA guide
aacccgccgcccucccagcau

SEQ ID NO: 96515 - RNA, 21 nt, Artificial Sequence
  LRRK2 RNA guide
aacccggacucuuaaggagcc

SEQ ID NO: 96516 - RNA, 21 nt, Artificial Sequence
  LRRK2 RNA guide
aaccggcaggggcgccggcca

SEQ ID NO: 96517 - RNA, 21 nt, Artificial Sequence
  LRRK2 RNA guide
aacgcugguccaaauccugga

SEQ ID NO: 96518 - RNA, 21 nt, Artificial Sequence
  LRRK2 RNA guide
aacggggagaaaagucaaaaa

SEQ ID NO: 96519 - RNA, 21 nt, Artificial Sequence
  LRRK2 RNA guide
aacguccgcugcucagggaac

SEQ ID NO: 96520 - RNA, 21 nt, Artificial Sequence
  LRRK2 RNA guide
aacucccauauccuuuccuua

SEQ ID NO: 96521 - RNA, 21 nt, Artificial Sequence
  LRRK2 RNA guide
aacucugaagaaguugauagu

SEQ ID NO: 96522 - RNA, 21 nt, Artificial Sequence
  LRRK2 RNA guide
aacuucuucagaguuuccucg

SEQ ID NO: 96523 - RNA, 21 nt, Artificial Sequence
  LRRK2 RNA guide
aacuuucucccccuccuuaca

SEQ ID NO: 96524 - RNA, 21 nt, Artificial Sequence
  LRRK2 RNA guide
aagaaguugauagucaggcug

SEQ ID NO: 96525 - RNA, 21 nt, Artificial Sequence
  LRRK2 RNA guide
aagaccuuccugaaauucuca

SEQ ID NO: 96526 - RNA, 21 nt, Artificial Sequence
  LRRK2 RNA guide
aagaggacgaggaaacucuga

SEQ ID NO: 96527 - RNA, 21 nt, Artificial Sequence
  LRRK2 RNA guide
aagaguccggguuugagcagg

SEQ ID NO: 96528 - RNA, 21 nt, Artificial Sequence
  LRRK2 RNA guide
aagcagcugagaauuucagga

SEQ ID NO: 96529 - RNA, 21 nt, Artificial Sequence
  LRRK2 RNA guide
aagcaggugccaccauggcua

SEQ ID NO: 96530 - RNA, 21 nt, Artificial Sequence
  LRRK2 RNA guide
aaggaaaacagauagaaacgc

SEQ ID NO: 96531 - RNA, 21 nt, Artificial Sequence
  LRRK2 RNA guide
aaggaaaggauaugggaguuu

SEQ ID NO: 96532 - RNA, 21 nt, Artificial Sequence
  LRRK2 RNA guide
aaggagccgcaaacucccaua

SEQ ID NO: 96533 - RNA, 21 nt, Artificial Sequence
  LRRK2 RNA guide
aaggagggggagaaaguuugc

SEQ ID NO: 96534 - RNA, 21 nt, Artificial Sequence
  LRRK2 RNA guide
aaggauaugggaguuugcggc

SEQ ID NO: 96535 - RNA, 21 nt, Artificial Sequence
  LRRK2 RNA guide
aaggggaggaggacaaaauuu

SEQ ID NO: 96536 - RNA, 21 nt, Artificial Sequence
  LRRK2 RNA guide
aaggucuucaccuuuuugacu

SEQ ID NO: 96537 - RNA, 21 nt, Artificial Sequence
  LRRK2 RNA guide
aaggugaagaccuuccugaaa

SEQ ID NO: 96538 - RNA, 21 nt, Artificial Sequence
  LRRK2 RNA guide
aagucaaaaaggugaagaccu

SEQ ID NO: 96539 - RNA, 21 nt, Artificial Sequence
  LRRK2 RNA guide
aagugauuaccgcgcucggag

SEQ ID NO: 96540 - RNA, 21 nt, Artificial Sequence
  LRRK2 RNA guide
aaguugauagucaggcugaac

SEQ ID NO: 96541 - RNA, 21 nt, Artificial Sequence
  LRRK2 RNA guide
aauccuggaggaucugcuggu

SEQ ID NO: 96542 - RNA, 21 nt, Artificial Sequence
  LRRK2 RNA guide
aauguaaggagggggagaaag

SEQ ID NO: 96543 - RNA, 21 nt, Artificial Sequence
  LRRK2 RNA guide
aauguccaggaaggaaaacag

SEQ ID NO: 96544 - RNA, 21 nt, Artificial Sequence
  LRRK2 RNA guide
aauucucagcugcuuucugcc

SEQ ID NO: 96545 - RNA, 21 nt, Artificial Sequence
  LRRK2 RNA guide
aauuucaggaaggucuucacc

SEQ ID NO: 96546 - RNA, 21 nt, Artificial Sequence
  LRRK2 RNA guide
aauuugcaaauguaaggaggg

SEQ ID NO: 96547 - RNA, 21 nt, Artificial Sequence
  LRRK2 RNA guide
aauuuuguccuccuccccuug

SEQ ID NO: 96548 - RNA, 21 nt, Artificial Sequence
  LRRK2 RNA guide
acaaaauuugcaaauguaagg

SEQ ID NO: 96549 - RNA, 21 nt, Artificial Sequence
  LRRK2 RNA guide
acaauguccaggaaggaaaac

SEQ ID NO: 96550 - RNA, 21 nt, Artificial Sequence
  LRRK2 RNA guide
acaccagcagauccuccagga

SEQ ID NO: 96551 - RNA, 21 nt, Artificial Sequence
  LRRK2 RNA guide
acagauagaaacgcuggucca

SEQ ID NO: 96552 - RNA, 21 nt, Artificial Sequence
  LRRK2 RNA guide
acagcuccccgggggcgagcu

SEQ ID NO: 96553 - RNA, 21 nt, Artificial Sequence
  LRRK2 RNA guide
acagcugccacuagccauggu

SEQ ID NO: 96554 - RNA, 21 nt, Artificial Sequence
  LRRK2 RNA guide
acaguuuauuuucaagugauu

SEQ ID NO: 96555 - RNA, 21 nt, Artificial Sequence
  LRRK2 RNA guide
acauuguucagccugacuauc

SEQ ID NO: 96556 - RNA, 21 nt, Artificial Sequence
  LRRK2 RNA guide
acauuugcaaauuuuguccuc

SEQ ID NO: 96557 - RNA, 21 nt, Artificial Sequence
  LRRK2 RNA guide
accagcagauccuccaggauu

SEQ ID NO: 96558 - RNA, 21 nt, Artificial Sequence
  LRRK2 RNA guide
accagcguuucuaucuguuuu

SEQ ID NO: 96559 - RNA, 21 nt, Artificial Sequence
  LRRK2 RNA guide
accauggcuaguggcagcugu

SEQ ID NO: 96560 - RNA, 21 nt, Artificial Sequence
  LRRK2 RNA guide
accccugacagcugccacuag

SEQ ID NO: 96561 - RNA, 21 nt, Artificial Sequence
  LRRK2 RNA guide
acccgccgcccucccagcaug

SEQ ID NO: 96562 - RNA, 21 nt, Artificial Sequence
  LRRK2 RNA guide
acccggacucuuaaggagccg

SEQ ID NO: 96563 - RNA, 21 nt, Artificial Sequence
  LRRK2 RNA guide
acccugcucaaacccggacuc

SEQ ID NO: 96564 - RNA, 21 nt, Artificial Sequence
  LRRK2 RNA guide
accgcgcucggaguacgugaa

SEQ ID NO: 96565 - RNA, 21 nt, Artificial Sequence
  LRRK2 RNA guide
accugcuuccaacccgccgcc

SEQ ID NO: 96566 - RNA, 21 nt, Artificial Sequence
  LRRK2 RNA guide
accuuccugaaauucucagcu

SEQ ID NO: 96567 - RNA, 21 nt, Artificial Sequence
  LRRK2 RNA guide
accuuuuugacuuuucucccc

SEQ ID NO: 96568 - RNA, 21 nt, Artificial Sequence
  LRRK2 RNA guide
acgaggaaacucugaagaagu

SEQ ID NO: 96569 - RNA, 21 nt, Artificial Sequence
  LRRK2 RNA guide
acgcugguccaaauccuggag

SEQ ID NO: 96570 - RNA, 21 nt, Artificial Sequence
  LRRK2 RNA guide
acggggagaaaagucaaaaag

SEQ ID NO: 96571 - RNA, 21 nt, Artificial Sequence
  LRRK2 RNA guide
acguacuccgagcgcgguaau

SEQ ID NO: 96572 - RNA, 21 nt, Artificial Sequence
  LRRK2 RNA guide
acguccgcugcucagggaacc

SEQ ID NO: 96573 - RNA, 21 nt, Artificial Sequence
  LRRK2 RNA guide
acgugaacaccagcagauccu

SEQ ID NO: 96574 - RNA, 21 nt, Artificial Sequence
  LRRK2 RNA guide
acguucaugcugggagggcgg

SEQ ID NO: 96575 - RNA, 21 nt, Artificial Sequence
  LRRK2 RNA guide
acuagccaugguggcaccugc

SEQ ID NO: 96576 - RNA, 21 nt, Artificial Sequence
  LRRK2 RNA guide
acuaucaacuucuucagaguu

SEQ ID NO: 96577 - RNA, 21 nt, Artificial Sequence
  LRRK2 RNA guide
acucccauauccuuuccuuag

SEQ ID NO: 96578 - RNA, 21 nt, Artificial Sequence
  LRRK2 RNA guide
acuccgagcgcgguaaucacu

SEQ ID NO: 96579 - RNA, 21 nt, Artificial Sequence
  LRRK2 RNA guide
acucugaagaaguugauaguc

SEQ ID NO: 96580 - RNA, 21 nt, Artificial Sequence
  LRRK2 RNA guide
acucuuaaggagccgcaaacu

SEQ ID NO: 96581 - RNA, 21 nt, Artificial Sequence
  LRRK2 RNA guide
acuucuucagaguuuccucgu

SEQ ID NO: 96582 - RNA, 21 nt, Artificial Sequence
  LRRK2 RNA guide
acuuucucccccuccuuacau

SEQ ID NO: 96583 - RNA, 21 nt, Artificial Sequence
  LRRK2 RNA guide
acuuuucuccccguuucagac

SEQ ID NO: 96584 - RNA, 21 nt, Artificial Sequence
  LRRK2 RNA guide
agaaaagucaaaaaggugaag

SEQ ID NO: 96585 - RNA, 21 nt, Artificial Sequence
  LRRK2 RNA guide
agaaacgcugguccaaauccu

SEQ ID NO: 96586 - RNA, 21 nt, Artificial Sequence
  LRRK2 RNA guide
agaaagcagcugagaauuuca

SEQ ID NO: 96587 - RNA, 21 nt, Artificial Sequence
  LRRK2 RNA guide
agaaguugauagucaggcuga

SEQ ID NO: 96588 - RNA, 21 nt, Artificial Sequence
  LRRK2 RNA guide
agaauuucaggaaggucuuca

SEQ ID NO: 96589 - RNA, 21 nt, Artificial Sequence
  LRRK2 RNA guide
agaccuuccugaaauucucag

SEQ ID NO: 96590 - RNA, 21 nt, Artificial Sequence
  LRRK2 RNA guide
agaggacgaggaaacucugaa

SEQ ID NO: 96591 - RNA, 21 nt, Artificial Sequence
  LRRK2 RNA guide
agaguccggguuugagcaggg

SEQ ID NO: 96592 - RNA, 21 nt, Artificial Sequence
  LRRK2 RNA guide
agaguuuccucguccucuucg

SEQ ID NO: 96593 - RNA, 21 nt, Artificial Sequence
  LRRK2 RNA guide
agauagaaacgcugguccaaa

SEQ ID NO: 96594 - RNA, 21 nt, Artificial Sequence
  LRRK2 RNA guide
agcacaguuuauuuucaagug

SEQ ID NO: 96595 - RNA, 21 nt, Artificial Sequence
  LRRK2 RNA guide
agcagauccuccaggauuugg

SEQ ID NO: 96596 - RNA, 21 nt, Artificial Sequence
  LRRK2 RNA guide
agcagcggacguucaugcugg

SEQ ID NO: 96597 - RNA, 21 nt, Artificial Sequence
  LRRK2 RNA guide
agcagcugagaauuucaggaa

SEQ ID NO: 96598 - RNA, 21 nt, Artificial Sequence
  LRRK2 RNA guide
agcagggucaaggggaggagg

SEQ ID NO: 96599 - RNA, 21 nt, Artificial Sequence
  LRRK2 RNA guide
agcaggugccaccauggcuag

SEQ ID NO: 96600 - RNA, 21 nt, Artificial Sequence
  LRRK2 RNA guide
agcaugaacguccgcugcuca

SEQ ID NO: 96601 - RNA, 21 nt, Artificial Sequence
  LRRK2 RNA guide
agccaugguggcaccugcuuc

SEQ ID NO: 96602 - RNA, 21 nt, Artificial Sequence
  LRRK2 RNA guide
agccgcaaacucccauauccu

SEQ ID NO: 96603 - RNA, 21 nt, Artificial Sequence
  LRRK2 RNA guide
agccugacuaucaacuucuuc

SEQ ID NO: 96604 - RNA, 21 nt, Artificial Sequence
  LRRK2 RNA guide
agcgcgguaaucacuugaaaa

SEQ ID NO: 96605 - RNA, 21 nt, Artificial Sequence
  LRRK2 RNA guide
agcgcuggcugcgggcgguga

SEQ ID NO: 96606 - RNA, 21 nt, Artificial Sequence
  LRRK2 RNA guide
agcggacguucaugcugggag

SEQ ID NO: 96607 - RNA, 21 nt, Artificial Sequence
  LRRK2 RNA guide
agcguuucuaucuguuuuccu

SEQ ID NO: 96608 - RNA, 21 nt, Artificial Sequence
  LRRK2 RNA guide
agcucaccgcccgcagccagc

SEQ ID NO: 96609 - RNA, 21 nt, Artificial Sequence
  LRRK2 RNA guide
agcucagcucaccgcccgcag

SEQ ID NO: 96610 - RNA, 21 nt, Artificial Sequence
  LRRK2 RNA guide
agcuccccgggggcgagcuca

SEQ ID NO: 96611 - RNA, 21 nt, Artificial Sequence
  LRRK2 RNA guide
agcugagaauuucaggaaggu

SEQ ID NO: 96612 - RNA, 21 nt, Artificial Sequence
  LRRK2 RNA guide
agcugagcucgcccccgggga

SEQ ID NO: 96613 - RNA, 21 nt, Artificial Sequence
  LRRK2 RNA guide
agcugccacuagccauggugg

SEQ ID NO: 96614 - RNA, 21 nt, Artificial Sequence
  LRRK2 RNA guide
agcugcuuucugcccuaagga

SEQ ID NO: 96615 - RNA, 21 nt, Artificial Sequence
  LRRK2 RNA guide
agcugucaggggugcgaagag

SEQ ID NO: 96616 - RNA, 21 nt, Artificial Sequence
  LRRK2 RNA guide
agcuguggccggcgccccugc

SEQ ID NO: 96617 - RNA, 21 nt, Artificial Sequence
  LRRK2 RNA guide
aggaaaacagauagaaacgcu

SEQ ID NO: 96618 - RNA, 21 nt, Artificial Sequence
  LRRK2 RNA guide
aggaaacucugaagaaguuga

SEQ ID NO: 96619 - RNA, 21 nt, Artificial Sequence
  LRRK2 RNA guide
aggaaaggauaugggaguuug

SEQ ID NO: 96620 - RNA, 21 nt, Artificial Sequence
  LRRK2 RNA guide
aggaaggucuucaccuuuuug

SEQ ID NO: 96621 - RNA, 21 nt, Artificial Sequence
  LRRK2 RNA guide
aggacaaaauuugcaaaugua

SEQ ID NO: 96622 - RNA, 21 nt, Artificial Sequence
  LRRK2 RNA guide
aggacgaggaaacucugaaga

SEQ ID NO: 96623 - RNA, 21 nt, Artificial Sequence
  LRRK2 RNA guide
aggagccgcaaacucccauau

SEQ ID NO: 96624 - RNA, 21 nt, Artificial Sequence
  LRRK2 RNA guide
aggaggacaaaauuugcaaau

SEQ ID NO: 96625 - RNA, 21 nt, Artificial Sequence
  LRRK2 RNA guide
aggagggggagaaaguuugca

SEQ ID NO: 96626 - RNA, 21 nt, Artificial Sequence
  LRRK2 RNA guide
aggauaugggaguuugcggcu

SEQ ID NO: 96627 - RNA, 21 nt, Artificial Sequence
  LRRK2 RNA guide
aggaucugcugguguucacgu

SEQ ID NO: 96628 - RNA, 21 nt, Artificial Sequence
  LRRK2 RNA guide
aggauuuggaccagcguuucu

SEQ ID NO: 96629 - RNA, 21 nt, Artificial Sequence
  LRRK2 RNA guide
aggcugaacaauguccaggaa

SEQ ID NO: 96630 - RNA, 21 nt, Artificial Sequence
  LRRK2 RNA guide
agggcagaaagcagcugagaa

SEQ ID NO: 96631 - RNA, 21 nt, Artificial Sequence
  LRRK2 RNA guide
agggcggcggguuggaagcag

SEQ ID NO: 96632 - RNA, 21 nt, Artificial Sequence
  LRRK2 RNA guide
aggggaggaggacaaaauuug

SEQ ID NO: 96633 - RNA, 21 nt, Artificial Sequence
  LRRK2 RNA guide
agggggagaaaguuugcaaaa

SEQ ID NO: 96634 - RNA, 21 nt, Artificial Sequence
  LRRK2 RNA guide
aggggugcgaagaggacgagg

SEQ ID NO: 96635 - RNA, 21 nt, Artificial Sequence
  LRRK2 RNA guide
agggucaaggggaggaggaca

SEQ ID NO: 96636 - RNA, 21 nt, Artificial Sequence
  LRRK2 RNA guide
aggucuucaccuuuuugacuu

SEQ ID NO: 96637 - RNA, 21 nt, Artificial Sequence
  LRRK2 RNA guide
aggugaagaccuuccugaaau

SEQ ID NO: 96638 - RNA, 21 nt, Artificial Sequence
  LRRK2 RNA guide
aggugccaccauggcuagugg

SEQ ID NO: 96639 - RNA, 21 nt, Artificial Sequence
  LRRK2 RNA guide
aguacgugaacaccagcagau

SEQ ID NO: 96640 - RNA, 21 nt, Artificial Sequence
  LRRK2 RNA guide
agucaaaaaggugaagaccuu

SEQ ID NO: 96641 - RNA, 21 nt, Artificial Sequence
  LRRK2 RNA guide
agucaggcugaacaaugucca

SEQ ID NO: 96642 - RNA, 21 nt, Artificial Sequence
  LRRK2 RNA guide
aguccggguuugagcaggguc

SEQ ID NO: 96643 - RNA, 21 nt, Artificial Sequence
  LRRK2 RNA guide
agucugaaacggggagaaaag

SEQ ID NO: 96644 - RNA, 21 nt, Artificial Sequence
  LRRK2 RNA guide
agugauuaccgcgcucggagu

SEQ ID NO: 96645 - RNA, 21 nt, Artificial Sequence
  LRRK2 RNA guide
aguugauagucaggcugaaca

SEQ ID NO: 96646 - RNA, 21 nt, Artificial Sequence
  LRRK2 RNA guide
aguuuauuuucaagugauuac

SEQ ID NO: 96647 - RNA, 21 nt, Artificial Sequence
  LRRK2 RNA guide
aguuuccucguccucuucgca

SEQ ID NO: 96648 - RNA, 21 nt, Artificial Sequence
  LRRK2 RNA guide
aguuugcggcuccuuaagagu

SEQ ID NO: 96649 - RNA, 21 nt, Artificial Sequence
  LRRK2 RNA guide
auagaaacgcugguccaaauc

SEQ ID NO: 96650 - RNA, 21 nt, Artificial Sequence
  LRRK2 RNA guide
auagucaggcugaacaauguc

SEQ ID NO: 96651 - RNA, 21 nt, Artificial Sequence
  LRRK2 RNA guide
auauccuuuccuuagggcaga

SEQ ID NO: 96652 - RNA, 21 nt, Artificial Sequence
  LRRK2 RNA guide
auaugggaguuugcggcuccu

SEQ ID NO: 96653 - RNA, 21 nt, Artificial Sequence
  LRRK2 RNA guide
aucaacuucuucagaguuucc

SEQ ID NO: 96654 - RNA, 21 nt, Artificial Sequence
  LRRK2 RNA guide
auccuggaggaucugcuggug

SEQ ID NO: 96655 - RNA, 21 nt, Artificial Sequence
  LRRK2 RNA guide
auccuuuccuuagggcagaaa

SEQ ID NO: 96656 - RNA, 21 nt, Artificial Sequence
  LRRK2 RNA guide
aucugcugguguucacguacu

SEQ ID NO: 96657 - RNA, 21 nt, Artificial Sequence
  LRRK2 RNA guide
aucuguuuuccuuccuggaca

SEQ ID NO: 96658 - RNA, 21 nt, Artificial Sequence
  LRRK2 RNA guide
augaacguccgcugcucaggg

SEQ ID NO: 96659 - RNA, 21 nt, Artificial Sequence
  LRRK2 RNA guide
augcugggagggcggcggguu

SEQ ID NO: 96660 - RNA, 21 nt, Artificial Sequence
  LRRK2 RNA guide
auggcuaguggcagcugucag

SEQ ID NO: 96661 - RNA, 21 nt, Artificial Sequence
  LRRK2 RNA guide
augggaguuugcggcuccuua

SEQ ID NO: 96662 - RNA, 21 nt, Artificial Sequence
  LRRK2 RNA guide
augguggcaccugcuuccaac

SEQ ID NO: 96663 - RNA, 21 nt, Artificial Sequence
  LRRK2 RNA guide
auguaaggagggggagaaagu

SEQ ID NO: 96664 - RNA, 21 nt, Artificial Sequence
  LRRK2 RNA guide
auguccaggaaggaaaacaga

SEQ ID NO: 96665 - RNA, 21 nt, Artificial Sequence
  LRRK2 RNA guide
auuaccgcgcucggaguacgu

SEQ ID NO: 96666 - RNA, 21 nt, Artificial Sequence
  LRRK2 RNA guide
auucucagcugcuuucugccc

SEQ ID NO: 96667 - RNA, 21 nt, Artificial Sequence
  LRRK2 RNA guide
auuguucagccugacuaucaa

SEQ ID NO: 96668 - RNA, 21 nt, Artificial Sequence
  LRRK2 RNA guide
auuucaggaaggucuucaccu

SEQ ID NO: 96669 - RNA, 21 nt, Artificial Sequence
  LRRK2 RNA guide
auuugcaaauguaaggagggg

SEQ ID NO: 96670 - RNA, 21 nt, Artificial Sequence
  LRRK2 RNA guide
auuugcaaauuuuguccuccu

SEQ ID NO: 96671 - RNA, 21 nt, Artificial Sequence
  LRRK2 RNA guide
auuuggaccagcguuucuauc

SEQ ID NO: 96672 - RNA, 21 nt, Artificial Sequence
  LRRK2 RNA guide
auuuucaagugauuaccgcgc

SEQ ID NO: 96673 - RNA, 21 nt, Artificial Sequence
  LRRK2 RNA guide
auuuuguccuccuccccuuga

SEQ ID NO: 96674 - RNA, 21 nt, Artificial Sequence
  LRRK2 RNA guide
auuuuugcaaacuuucucccc

SEQ ID NO: 96675 - RNA, 21 nt, Artificial Sequence
  LRRK2 RNA guide
caaaaaggugaagaccuuccu

SEQ ID NO: 96676 - RNA, 21 nt, Artificial Sequence
  LRRK2 RNA guide
caaaauuugcaaauguaagga

SEQ ID NO: 96677 - RNA, 21 nt, Artificial Sequence
  LRRK2 RNA guide
caaacccggacucuuaaggag

SEQ ID NO: 96678 - RNA, 21 nt, Artificial Sequence
  LRRK2 RNA guide
caaacucccauauccuuuccu

SEQ ID NO: 96679 - RNA, 21 nt, Artificial Sequence
  LRRK2 RNA guide
caaacuuucucccccuccuua

SEQ ID NO: 96680 - RNA, 21 nt, Artificial Sequence
  LRRK2 RNA guide
caaauccuggaggaucugcug

SEQ ID NO: 96681 - RNA, 21 nt, Artificial Sequence
  LRRK2 RNA guide
caaauguaaggagggggagaa

SEQ ID NO: 96682 - RNA, 21 nt, Artificial Sequence
  LRRK2 RNA guide
caaauuuuguccuccuccccu

SEQ ID NO: 96683 - RNA, 21 nt, Artificial Sequence
  LRRK2 RNA guide
caacccgccgcccucccagca

SEQ ID NO: 96684 - RNA, 21 nt, Artificial Sequence
  LRRK2 RNA guide
caacuucuucagaguuuccuc

SEQ ID NO: 96685 - RNA, 21 nt, Artificial Sequence
  LRRK2 RNA guide
caaggggaggaggacaaaauu

SEQ ID NO: 96686 - RNA, 21 nt, Artificial Sequence
  LRRK2 RNA guide
caagugauuaccgcgcucgga

SEQ ID NO: 96687 - RNA, 21 nt, Artificial Sequence
  LRRK2 RNA guide
caauguccaggaaggaaaaca

SEQ ID NO: 96688 - RNA, 21 nt, Artificial Sequence
  LRRK2 RNA guide
cacagcuccccgggggcgagc

SEQ ID NO: 96689 - RNA, 21 nt, Artificial Sequence
  LRRK2 RNA guide
cacaguuuauuuucaagugau

SEQ ID NO: 96690 - RNA, 21 nt, Artificial Sequence
  LRRK2 RNA guide
caccagcagauccuccaggau

SEQ ID NO: 96691 - RNA, 21 nt, Artificial Sequence
  LRRK2 RNA guide
caccauggcuaguggcagcug

SEQ ID NO: 96692 - RNA, 21 nt, Artificial Sequence
  LRRK2 RNA guide
caccccugacagcugccacua

SEQ ID NO: 96693 - RNA, 21 nt, Artificial Sequence
  LRRK2 RNA guide
caccugcuuccaacccgccgc

SEQ ID NO: 96694 - RNA, 21 nt, Artificial Sequence
  LRRK2 RNA guide
caccuuuuugacuuuucuccc

SEQ ID NO: 96695 - RNA, 21 nt, Artificial Sequence
  LRRK2 RNA guide
cacguacuccgagcgcgguaa

SEQ ID NO: 96696 - RNA, 21 nt, Artificial Sequence
  LRRK2 RNA guide
cacuagccaugguggcaccug

SEQ ID NO: 96697 - RNA, 21 nt, Artificial Sequence
  LRRK2 RNA guide
cagaaagcagcugagaauuuc

SEQ ID NO: 96698 - RNA, 21 nt, Artificial Sequence
  LRRK2 RNA guide
cagaguuuccucguccucuuc

SEQ ID NO: 96699 - RNA, 21 nt, Artificial Sequence
  LRRK2 RNA guide
cagauagaaacgcugguccaa

SEQ ID NO: 96700 - RNA, 21 nt, Artificial Sequence
  LRRK2 RNA guide
cagcagauccuccaggauuug

SEQ ID NO: 96701 - RNA, 21 nt, Artificial Sequence
  LRRK2 RNA guide
cagcaugaacguccgcugcuc

SEQ ID NO: 96702 - RNA, 21 nt, Artificial Sequence
  LRRK2 RNA guide
cagccugacuaucaacuucuu

SEQ ID NO: 96703 - RNA, 21 nt, Artificial Sequence
  LRRK2 RNA guide
cagcggacguucaugcuggga

SEQ ID NO: 96704 - RNA, 21 nt, Artificial Sequence
  LRRK2 RNA guide
cagcguuucuaucuguuuucc

SEQ ID NO: 96705 - RNA, 21 nt, Artificial Sequence
  LRRK2 RNA guide
cagcucaccgcccgcagccag

SEQ ID NO: 96706 - RNA, 21 nt, Artificial Sequence
  LRRK2 RNA guide
cagcuccccgggggcgagcuc

SEQ ID NO: 96707 - RNA, 21 nt, Artificial Sequence
  LRRK2 RNA guide
cagcugagaauuucaggaagg

SEQ ID NO: 96708 - RNA, 21 nt, Artificial Sequence
  LRRK2 RNA guide
cagcugccacuagccauggug

SEQ ID NO: 96709 - RNA, 21 nt, Artificial Sequence
  LRRK2 RNA guide
cagcugcuuucugcccuaagg

SEQ ID NO: 96710 - RNA, 21 nt, Artificial Sequence
  LRRK2 RNA guide
cagcugucaggggugcgaaga

SEQ ID NO: 96711 - RNA, 21 nt, Artificial Sequence
  LRRK2 RNA guide
caggaaggucuucaccuuuuu

SEQ ID NO: 96712 - RNA, 21 nt, Artificial Sequence
  LRRK2 RNA guide
caggauuuggaccagcguuuc

SEQ ID NO: 96713 - RNA, 21 nt, Artificial Sequence
  LRRK2 RNA guide
caggcugaacaauguccagga

SEQ ID NO: 96714 - RNA, 21 nt, Artificial Sequence
  LRRK2 RNA guide
caggggugcgaagaggacgag

SEQ ID NO: 96715 - RNA, 21 nt, Artificial Sequence
  LRRK2 RNA guide
cagggucaaggggaggaggac

SEQ ID NO: 96716 - RNA, 21 nt, Artificial Sequence
  LRRK2 RNA guide
caggugccaccauggcuagug

SEQ ID NO: 96717 - RNA, 21 nt, Artificial Sequence
  LRRK2 RNA guide
caguuuauuuucaagugauua

SEQ ID NO: 96718 - RNA, 21 nt, Artificial Sequence
  LRRK2 RNA guide
cauauccuuuccuuagggcag

SEQ ID NO: 96719 - RNA, 21 nt, Artificial Sequence
  LRRK2 RNA guide
caugaacguccgcugcucagg

SEQ ID NO: 96720 - RNA, 21 nt, Artificial Sequence
  LRRK2 RNA guide
caugcugggagggcggcgggu

SEQ ID NO: 96721 - RNA, 21 nt, Artificial Sequence
  LRRK2 RNA guide
cauggcuaguggcagcuguca

SEQ ID NO: 96722 - RNA, 21 nt, Artificial Sequence
  LRRK2 RNA guide
caugguggcaccugcuuccaa

SEQ ID NO: 96723 - RNA, 21 nt, Artificial Sequence
  LRRK2 RNA guide
cauuguucagccugacuauca

SEQ ID NO: 96724 - RNA, 21 nt, Artificial Sequence
  LRRK2 RNA guide
cauuugcaaauuuuguccucc

SEQ ID NO: 96725 - RNA, 21 nt, Artificial Sequence
  LRRK2 RNA guide
ccaaauccuggaggaucugcu

SEQ ID NO: 96726 - RNA, 21 nt, Artificial Sequence
  LRRK2 RNA guide
ccaacccgccgcccucccagc

SEQ ID NO: 96727 - RNA, 21 nt, Artificial Sequence
  LRRK2 RNA guide
ccacagcuccccgggggcgag

SEQ ID NO: 96728 - RNA, 21 nt, Artificial Sequence
  LRRK2 RNA guide
ccaccauggcuaguggcagcu

SEQ ID NO: 96729 - RNA, 21 nt, Artificial Sequence
  LRRK2 RNA guide
ccacuagccaugguggcaccu

SEQ ID NO: 96730 - RNA, 21 nt, Artificial Sequence
  LRRK2 RNA guide
ccagcagauccuccaggauuu

SEQ ID NO: 96731 - RNA, 21 nt, Artificial Sequence
  LRRK2 RNA guide
ccagcaugaacguccgcugcu

SEQ ID NO: 96732 - RNA, 21 nt, Artificial Sequence
  LRRK2 RNA guide
ccagcguuucuaucuguuuuc

SEQ ID NO: 96733 - RNA, 21 nt, Artificial Sequence
  LRRK2 RNA guide
ccaggauuuggaccagcguuu

SEQ ID NO: 96734 - RNA, 21 nt, Artificial Sequence
  LRRK2 RNA guide
ccauauccuuuccuuagggca

SEQ ID NO: 96735 - RNA, 21 nt, Artificial Sequence
  LRRK2 RNA guide
ccauggcuaguggcagcuguc

SEQ ID NO: 96736 - RNA, 21 nt, Artificial Sequence
  LRRK2 RNA guide
ccaugguggcaccugcuucca

SEQ ID NO: 96737 - RNA, 21 nt, Artificial Sequence
  LRRK2 RNA guide
cccagcaugaacguccgcugc

SEQ ID NO: 96738 - RNA, 21 nt, Artificial Sequence
  LRRK2 RNA guide
cccauauccuuuccuuagggc

SEQ ID NO: 96739 - RNA, 21 nt, Artificial Sequence
  LRRK2 RNA guide
cccccuccuuacauuugcaaa

SEQ ID NO: 96740 - RNA, 21 nt, Artificial Sequence
  LRRK2 RNA guide
ccccuccuuacauuugcaaau

SEQ ID NO: 96741 - RNA, 21 nt, Artificial Sequence
  LRRK2 RNA guide
ccccugacagcugccacuagc

SEQ ID NO: 96742 - RNA, 21 nt, Artificial Sequence
  LRRK2 RNA guide
ccccuugacccugcucaaacc

SEQ ID NO: 96743 - RNA, 21 nt, Artificial Sequence
  LRRK2 RNA guide
cccggacucuuaaggagccgc

SEQ ID NO: 96744 - RNA, 21 nt, Artificial Sequence
  LRRK2 RNA guide
cccuaaggaaaggauauggga

SEQ ID NO: 96745 - RNA, 21 nt, Artificial Sequence
  LRRK2 RNA guide
cccucccagcaugaacguccg

SEQ ID NO: 96746 - RNA, 21 nt, Artificial Sequence
  LRRK2 RNA guide
cccuccuuacauuugcaaauu

SEQ ID NO: 96747 - RNA, 21 nt, Artificial Sequence
  LRRK2 RNA guide
cccugacagcugccacuagcc

SEQ ID NO: 96748 - RNA, 21 nt, Artificial Sequence
  LRRK2 RNA guide
cccugagcagcggacguucau

SEQ ID NO: 96749 - RNA, 21 nt, Artificial Sequence
  LRRK2 RNA guide
cccugcucaaacccggacucu

SEQ ID NO: 96750 - RNA, 21 nt, Artificial Sequence
  LRRK2 RNA guide
cccuugacccugcucaaaccc

SEQ ID NO: 96751 - RNA, 21 nt, Artificial Sequence
  LRRK2 RNA guide
ccgagcgcgguaaucacuuga

SEQ ID NO: 96752 - RNA, 21 nt, Artificial Sequence
  LRRK2 RNA guide
ccgcaaacucccauauccuuu

SEQ ID NO: 96753 - RNA, 21 nt, Artificial Sequence
  LRRK2 RNA guide
ccgcgcucggaguacgugaac

SEQ ID NO: 96754 - RNA, 21 nt, Artificial Sequence
  LRRK2 RNA guide
ccgcugcucagggaaccggca

SEQ ID NO: 96755 - RNA, 21 nt, Artificial Sequence
  LRRK2 RNA guide
ccggacucuuaaggagccgca

SEQ ID NO: 96756 - RNA, 21 nt, Artificial Sequence
  LRRK2 RNA guide
ccggguuugagcagggucaag

SEQ ID NO: 96757 - RNA, 21 nt, Artificial Sequence
  LRRK2 RNA guide
ccgguucccugagcagcggac

SEQ ID NO: 96758 - RNA, 21 nt, Artificial Sequence
  LRRK2 RNA guide
ccuaaggaaaggauaugggag

SEQ ID NO: 96759 - RNA, 21 nt, Artificial Sequence
  LRRK2 RNA guide
ccuccaggauuuggaccagcg

SEQ ID NO: 96760 - RNA, 21 nt, Artificial Sequence
  LRRK2 RNA guide
ccucccagcaugaacguccgc

SEQ ID NO: 96761 - RNA, 21 nt, Artificial Sequence
  LRRK2 RNA guide
ccuccccuugacccugcucaa

SEQ ID NO: 96762 - RNA, 21 nt, Artificial Sequence
  LRRK2 RNA guide
ccuccuccccuugacccugcu

SEQ ID NO: 96763 - RNA, 21 nt, Artificial Sequence
  LRRK2 RNA guide
ccuccuuacauuugcaaauuu

SEQ ID NO: 96764 - RNA, 21 nt, Artificial Sequence
  LRRK2 RNA guide
ccucguccucuucgcaccccu

SEQ ID NO: 96765 - RNA, 21 nt, Artificial Sequence
  LRRK2 RNA guide
ccucuucgcaccccugacagc

SEQ ID NO: 96766 - RNA, 21 nt, Artificial Sequence
  LRRK2 RNA guide
ccugaaauucucagcugcuuu

SEQ ID NO: 96767 - RNA, 21 nt, Artificial Sequence
  LRRK2 RNA guide
ccugacagcugccacuagcca

SEQ ID NO: 96768 - RNA, 21 nt, Artificial Sequence
  LRRK2 RNA guide
ccugacuaucaacuucuucag

SEQ ID NO: 96769 - RNA, 21 nt, Artificial Sequence
  LRRK2 RNA guide
ccugagcagcggacguucaug

SEQ ID NO: 96770 - RNA, 21 nt, Artificial Sequence
  LRRK2 RNA guide
ccugcucaaacccggacucuu

SEQ ID NO: 96771 - RNA, 21 nt, Artificial Sequence
  LRRK2 RNA guide
ccugcuuccaacccgccgccc

SEQ ID NO: 96772 - RNA, 21 nt, Artificial Sequence
  LRRK2 RNA guide
ccuggacauuguucagccuga

SEQ ID NO: 96773 - RNA, 21 nt, Artificial Sequence
  LRRK2 RNA guide
ccuggaggaucugcugguguu

SEQ ID NO: 96774 - RNA, 21 nt, Artificial Sequence
  LRRK2 RNA guide
ccuuaagaguccggguuugag

SEQ ID NO: 96775 - RNA, 21 nt, Artificial Sequence
  LRRK2 RNA guide
ccuuacauuugcaaauuuugu

SEQ ID NO: 96776 - RNA, 21 nt, Artificial Sequence
  LRRK2 RNA guide
ccuuagggcagaaagcagcug

SEQ ID NO: 96777 - RNA, 21 nt, Artificial Sequence
  LRRK2 RNA guide
ccuuccugaaauucucagcug

SEQ ID NO: 96778 - RNA, 21 nt, Artificial Sequence
  LRRK2 RNA guide
ccuuccuggacauuguucagc

SEQ ID NO: 96779 - RNA, 21 nt, Artificial Sequence
  LRRK2 RNA guide
ccuugacccugcucaaacccg

SEQ ID NO: 96780 - RNA, 21 nt, Artificial Sequence
  LRRK2 RNA guide
ccuuuccuuagggcagaaagc

SEQ ID NO: 96781 - RNA, 21 nt, Artificial Sequence
  LRRK2 RNA guide
ccuuuuugacuuuucuccccg

SEQ ID NO: 96782 - RNA, 21 nt, Artificial Sequence
  LRRK2 RNA guide
cgaagaggacgaggaaacucu

SEQ ID NO: 96783 - RNA, 21 nt, Artificial Sequence
  LRRK2 RNA guide
cgagcgcgguaaucacuugaa

SEQ ID NO: 96784 - RNA, 21 nt, Artificial Sequence
  LRRK2 RNA guide
cgagcucagcucaccgcccgc

SEQ ID NO: 96785 - RNA, 21 nt, Artificial Sequence
  LRRK2 RNA guide
cgaggaaacucugaagaaguu

SEQ ID NO: 96786 - RNA, 21 nt, Artificial Sequence
  LRRK2 RNA guide
cgcaaacucccauauccuuuc

SEQ ID NO: 96787 - RNA, 21 nt, Artificial Sequence
  LRRK2 RNA guide
cgcaccccugacagcugccac

SEQ ID NO: 96788 - RNA, 21 nt, Artificial Sequence
  LRRK2 RNA guide
cgccccugccgguucccugag

SEQ ID NO: 96789 - RNA, 21 nt, Artificial Sequence
  LRRK2 RNA guide
cgcccucccagcaugaacguc

SEQ ID NO: 96790 - RNA, 21 nt, Artificial Sequence
  LRRK2 RNA guide
cgcgcucggaguacgugaaca

SEQ ID NO: 96791 - RNA, 21 nt, Artificial Sequence
  LRRK2 RNA guide
cgcgguaaucacuugaaaaua

SEQ ID NO: 96792 - RNA, 21 nt, Artificial Sequence
  LRRK2 RNA guide
cgcucggaguacgugaacacc

SEQ ID NO: 96793 - RNA, 21 nt, Artificial Sequence
  LRRK2 RNA guide
cgcugcucagggaaccggcag

SEQ ID NO: 96794 - RNA, 21 nt, Artificial Sequence
  LRRK2 RNA guide
cgcuggcugcgggcggugagc

SEQ ID NO: 96795 - RNA, 21 nt, Artificial Sequence
  LRRK2 RNA guide
cgcugguccaaauccuggagg

SEQ ID NO: 96796 - RNA, 21 nt, Artificial Sequence
  LRRK2 RNA guide
cggacguucaugcugggaggg

SEQ ID NO: 96797 - RNA, 21 nt, Artificial Sequence
  LRRK2 RNA guide
cggacucuuaaggagccgcaa

SEQ ID NO: 96798 - RNA, 21 nt, Artificial Sequence
  LRRK2 RNA guide
cggaguacgugaacaccagca

SEQ ID NO: 96799 - RNA, 21 nt, Artificial Sequence
  LRRK2 RNA guide
cggcgccccugccgguucccu

SEQ ID NO: 96800 - RNA, 21 nt, Artificial Sequence
  LRRK2 RNA guide
cggcggguuggaagcaggugc

SEQ ID NO: 96801 - RNA, 21 nt, Artificial Sequence
  LRRK2 RNA guide
cggcuccuuaagaguccgggu

SEQ ID NO: 96802 - RNA, 21 nt, Artificial Sequence
  LRRK2 RNA guide
cggggagaaaagucaaaaagg

SEQ ID NO: 96803 - RNA, 21 nt, Artificial Sequence
  LRRK2 RNA guide
cggguuggaagcaggugccac

SEQ ID NO: 96804 - RNA, 21 nt, Artificial Sequence
  LRRK2 RNA guide
cggguuugagcagggucaagg

SEQ ID NO: 96805 - RNA, 21 nt, Artificial Sequence
  LRRK2 RNA guide
cgguaaucacuugaaaauaaa

SEQ ID NO: 96806 - RNA, 21 nt, Artificial Sequence
  LRRK2 RNA guide
cggugagcugagcucgccccc

SEQ ID NO: 96807 - RNA, 21 nt, Artificial Sequence
  LRRK2 RNA guide
cgguucccugagcagcggacg

SEQ ID NO: 96808 - RNA, 21 nt, Artificial Sequence
  LRRK2 RNA guide
cguacuccgagcgcgguaauc

SEQ ID NO: 96809 - RNA, 21 nt, Artificial Sequence
  LRRK2 RNA guide
cguccgcugcucagggaaccg

SEQ ID NO: 96810 - RNA, 21 nt, Artificial Sequence
  LRRK2 RNA guide
cguccucuucgcaccccugac

SEQ ID NO: 96811 - RNA, 21 nt, Artificial Sequence
  LRRK2 RNA guide
cgugaacaccagcagauccuc

SEQ ID NO: 96812 - RNA, 21 nt, Artificial Sequence
  LRRK2 RNA guide
cguucaugcugggagggcggc

SEQ ID NO: 96813 - RNA, 21 nt, Artificial Sequence
  LRRK2 RNA guide
cguuucuaucuguuuuccuuc

SEQ ID NO: 96814 - RNA, 21 nt, Artificial Sequence
  LRRK2 RNA guide
cuaaggaaaggauaugggagu

SEQ ID NO: 96815 - RNA, 21 nt, Artificial Sequence
  LRRK2 RNA guide
cuagccaugguggcaccugcu

SEQ ID NO: 96816 - RNA, 21 nt, Artificial Sequence
  LRRK2 RNA guide
cuaucaacuucuucagaguuu

SEQ ID NO: 96817 - RNA, 21 nt, Artificial Sequence
  LRRK2 RNA guide
cuaucuguuuuccuuccugga

SEQ ID NO: 96818 - RNA, 21 nt, Artificial Sequence
  LRRK2 RNA guide
cucaaacccggacucuuaagg

SEQ ID NO: 96819 - RNA, 21 nt, Artificial Sequence
  LRRK2 RNA guide
cucagcucaccgcccgcagcc

SEQ ID NO: 96820 - RNA, 21 nt, Artificial Sequence
  LRRK2 RNA guide
cucagcugcuuucugcccuaa

SEQ ID NO: 96821 - RNA, 21 nt, Artificial Sequence
  LRRK2 RNA guide
cuccaggauuuggaccagcgu

SEQ ID NO: 96822 - RNA, 21 nt, Artificial Sequence
  LRRK2 RNA guide
cucccagcaugaacguccgcu

SEQ ID NO: 96823 - RNA, 21 nt, Artificial Sequence
  LRRK2 RNA guide
cucccauauccuuuccuuagg

SEQ ID NO: 96824 - RNA, 21 nt, Artificial Sequence
  LRRK2 RNA guide
cucccccuccuuacauuugca

SEQ ID NO: 96825 - RNA, 21 nt, Artificial Sequence
  LRRK2 RNA guide
cuccccgggggcgagcucagc

SEQ ID NO: 96826 - RNA, 21 nt, Artificial Sequence
  LRRK2 RNA guide
cuccccuugacccugcucaaa

SEQ ID NO: 96827 - RNA, 21 nt, Artificial Sequence
  LRRK2 RNA guide
cuccgagcgcgguaaucacuu

SEQ ID NO: 96828 - RNA, 21 nt, Artificial Sequence
  LRRK2 RNA guide
cuccuccccuugacccugcuc

SEQ ID NO: 96829 - RNA, 21 nt, Artificial Sequence
  LRRK2 RNA guide
cuccuuaagaguccggguuug

SEQ ID NO: 96830 - RNA, 21 nt, Artificial Sequence
  LRRK2 RNA guide
cuccuuacauuugcaaauuuu

SEQ ID NO: 96831 - RNA, 21 nt, Artificial Sequence
  LRRK2 RNA guide
cucggaguacgugaacaccag

SEQ ID NO: 96832 - RNA, 21 nt, Artificial Sequence
  LRRK2 RNA guide
cucguccucuucgcaccccug

SEQ ID NO: 96833 - RNA, 21 nt, Artificial Sequence
  LRRK2 RNA guide
cucugaagaaguugauaguca

SEQ ID NO: 96834 - RNA, 21 nt, Artificial Sequence
  LRRK2 RNA guide
cucuuaaggagccgcaaacuc

SEQ ID NO: 96835 - RNA, 21 nt, Artificial Sequence
  LRRK2 RNA guide
cucuucgcaccccugacagcu

SEQ ID NO: 96836 - RNA, 21 nt, Artificial Sequence
  LRRK2 RNA guide
cugaaacggggagaaaaguca

SEQ ID NO: 96837 - RNA, 21 nt, Artificial Sequence
  LRRK2 RNA guide
cugaaauucucagcugcuuuc

SEQ ID NO: 96838 - RNA, 21 nt, Artificial Sequence
  LRRK2 RNA guide
cugaacaauguccaggaagga

SEQ ID NO: 96839 - RNA, 21 nt, Artificial Sequence
  LRRK2 RNA guide
cugaagaaguugauagucagg

SEQ ID NO: 96840 - RNA, 21 nt, Artificial Sequence
  LRRK2 RNA guide
cugacagcugccacuagccau

SEQ ID NO: 96841 - RNA, 21 nt, Artificial Sequence
  LRRK2 RNA guide
cugacuaucaacuucuucaga

SEQ ID NO: 96842 - RNA, 21 nt, Artificial Sequence
  LRRK2 RNA guide
cugagaauuucaggaaggucu

SEQ ID NO: 96843 - RNA, 21 nt, Artificial Sequence
  LRRK2 RNA guide
cugagcagcggacguucaugc

SEQ ID NO: 96844 - RNA, 21 nt, Artificial Sequence
  LRRK2 RNA guide
cugagcucgcccccggggagc

SEQ ID NO: 96845 - RNA, 21 nt, Artificial Sequence
  LRRK2 RNA guide
cugccacuagccaugguggca

SEQ ID NO: 96846 - RNA, 21 nt, Artificial Sequence
  LRRK2 RNA guide
cugcccuaaggaaaggauaug

SEQ ID NO: 96847 - RNA, 21 nt, Artificial Sequence
  LRRK2 RNA guide
cugcucaaacccggacucuua

SEQ ID NO: 96848 - RNA, 21 nt, Artificial Sequence
  LRRK2 RNA guide
cugcucagggaaccggcaggg

SEQ ID NO: 96849 - RNA, 21 nt, Artificial Sequence
  LRRK2 RNA guide
cugcugguguucacguacucc

SEQ ID NO: 96850 - RNA, 21 nt, Artificial Sequence
  LRRK2 RNA guide
cugcuuccaacccgccgcccu

SEQ ID NO: 96851 - RNA, 21 nt, Artificial Sequence
  LRRK2 RNA guide
cugcuuucugcccuaaggaaa

SEQ ID NO: 96852 - RNA, 21 nt, Artificial Sequence
  LRRK2 RNA guide
cuggacauuguucagccugac

SEQ ID NO: 96853 - RNA, 21 nt, Artificial Sequence
  LRRK2 RNA guide
cuggaggaucugcugguguuc

SEQ ID NO: 96854 - RNA, 21 nt, Artificial Sequence
  LRRK2 RNA guide
cuggcugcgggcggugagcug

SEQ ID NO: 96855 - RNA, 21 nt, Artificial Sequence
  LRRK2 RNA guide
cugggagggcggcggguugga

SEQ ID NO: 96856 - RNA, 21 nt, Artificial Sequence
  LRRK2 RNA guide
cugguccaaauccuggaggau

SEQ ID NO: 96857 - RNA, 21 nt, Artificial Sequence
  LRRK2 RNA guide
cugguguucacguacuccgag

SEQ ID NO: 96858 - RNA, 21 nt, Artificial Sequence
  LRRK2 RNA guide
cugucaggggugcgaagagga

SEQ ID NO: 96859 - RNA, 21 nt, Artificial Sequence
  LRRK2 RNA guide
cugugcuuuuauuuuugcaaa

SEQ ID NO: 96860 - RNA, 21 nt, Artificial Sequence
  LRRK2 RNA guide
cuguuuuccuuccuggacauu

SEQ ID NO: 96861 - RNA, 21 nt, Artificial Sequence
  LRRK2 RNA guide
cuuaagaguccggguuugagc

SEQ ID NO: 96862 - RNA, 21 nt, Artificial Sequence
  LRRK2 RNA guide
cuuaaggagccgcaaacuccc

SEQ ID NO: 96863 - RNA, 21 nt, Artificial Sequence
  LRRK2 RNA guide
cuuacauuugcaaauuuuguc

SEQ ID NO: 96864 - RNA, 21 nt, Artificial Sequence
  LRRK2 RNA guide
cuuagggcagaaagcagcuga

SEQ ID NO: 96865 - RNA, 21 nt, Artificial Sequence
  LRRK2 RNA guide
cuucaccuuuuugacuuuucu

SEQ ID NO: 96866 - RNA, 21 nt, Artificial Sequence
  LRRK2 RNA guide
cuuccaacccgccgcccuccc

SEQ ID NO: 96867 - RNA, 21 nt, Artificial Sequence
  LRRK2 RNA guide
cuuccugaaauucucagcugc

SEQ ID NO: 96868 - RNA, 21 nt, Artificial Sequence
  LRRK2 RNA guide
cuuccuggacauuguucagcc

SEQ ID NO: 96869 - RNA, 21 nt, Artificial Sequence
  LRRK2 RNA guide
cuucgcaccccugacagcugc

SEQ ID NO: 96870 - RNA, 21 nt, Artificial Sequence
  LRRK2 RNA guide
cuucuucagaguuuccucguc

SEQ ID NO: 96871 - RNA, 21 nt, Artificial Sequence
  LRRK2 RNA guide
cuugacccugcucaaacccgg

SEQ ID NO: 96872 - RNA, 21 nt, Artificial Sequence
  LRRK2 RNA guide
cuuuccuuagggcagaaagca

SEQ ID NO: 96873 - RNA, 21 nt, Artificial Sequence
  LRRK2 RNA guide
cuuucucccccuccuuacauu

SEQ ID NO: 96874 - RNA, 21 nt, Artificial Sequence
  LRRK2 RNA guide
cuuucugcccuaaggaaagga

SEQ ID NO: 96875 - RNA, 21 nt, Artificial Sequence
  LRRK2 RNA guide
cuuuuauuuuugcaaacuuuc

SEQ ID NO: 96876 - RNA, 21 nt, Artificial Sequence
  LRRK2 RNA guide
cuuuucuccccguuucagacu

SEQ ID NO: 96877 - RNA, 21 nt, Artificial Sequence
  LRRK2 RNA guide
cuuuuuagucugaaacgggga

SEQ ID NO: 96878 - RNA, 21 nt, Artificial Sequence
  LRRK2 RNA guide
cuuuuugacuuuucuccccgu

SEQ ID NO: 96879 - RNA, 21 nt, Artificial Sequence
  LRRK2 RNA guide
gaaaacagauagaaacgcugg

SEQ ID NO: 96880 - RNA, 21 nt, Artificial Sequence
  LRRK2 RNA guide
gaaaagucaaaaaggugaaga

SEQ ID NO: 96881 - RNA, 21 nt, Artificial Sequence
  LRRK2 RNA guide
gaaacgcugguccaaauccug

SEQ ID NO: 96882 - RNA, 21 nt, Artificial Sequence
  LRRK2 RNA guide
gaaacggggagaaaagucaaa

SEQ ID NO: 96883 - RNA, 21 nt, Artificial Sequence
  LRRK2 RNA guide
gaaacucugaagaaguugaua

SEQ ID NO: 96884 - RNA, 21 nt, Artificial Sequence
  LRRK2 RNA guide
gaaagcagcugagaauuucag

SEQ ID NO: 96885 - RNA, 21 nt, Artificial Sequence
  LRRK2 RNA guide
gaaaggauaugggaguuugcg

SEQ ID NO: 96886 - RNA, 21 nt, Artificial Sequence
  LRRK2 RNA guide
gaaaguuugcaaaaauaaaag

SEQ ID NO: 96887 - RNA, 21 nt, Artificial Sequence
  LRRK2 RNA guide
gaaauucucagcugcuuucug

SEQ ID NO: 96888 - RNA, 21 nt, Artificial Sequence
  LRRK2 RNA guide
gaacaauguccaggaaggaaa

SEQ ID NO: 96889 - RNA, 21 nt, Artificial Sequence
  LRRK2 RNA guide
gaacaccagcagauccuccag

SEQ ID NO: 96890 - RNA, 21 nt, Artificial Sequence
  LRRK2 RNA guide
gaacguccgcugcucagggaa

SEQ ID NO: 96891 - RNA, 21 nt, Artificial Sequence
  LRRK2 RNA guide
gaagaaguugauagucaggcu

SEQ ID NO: 96892 - RNA, 21 nt, Artificial Sequence
  LRRK2 RNA guide
gaagaccuuccugaaauucuc

SEQ ID NO: 96893 - RNA, 21 nt, Artificial Sequence
  LRRK2 RNA guide
gaagaggacgaggaaacucug

SEQ ID NO: 96894 - RNA, 21 nt, Artificial Sequence
  LRRK2 RNA guide
gaagcaggugccaccauggcu

SEQ ID NO: 96895 - RNA, 21 nt, Artificial Sequence
  LRRK2 RNA guide
gaaggaaaacagauagaaacg

SEQ ID NO: 96896 - RNA, 21 nt, Artificial Sequence
  LRRK2 RNA guide
gaaggucuucaccuuuuugac

SEQ ID NO: 96897 - RNA, 21 nt, Artificial Sequence
  LRRK2 RNA guide
gaaguugauagucaggcugaa

SEQ ID NO: 96898 - RNA, 21 nt, Artificial Sequence
  LRRK2 RNA guide
gaauuucaggaaggucuucac

SEQ ID NO: 96899 - RNA, 21 nt, Artificial Sequence
  LRRK2 RNA guide
gacaaaauuugcaaauguaag

SEQ ID NO: 96900 - RNA, 21 nt, Artificial Sequence
  LRRK2 RNA guide
gacagcugccacuagccaugg

SEQ ID NO: 96901 - RNA, 21 nt, Artificial Sequence
  LRRK2 RNA guide
gacauuguucagccugacuau

SEQ ID NO: 96902 - RNA, 21 nt, Artificial Sequence
  LRRK2 RNA guide
gaccagcguuucuaucuguuu

SEQ ID NO: 96903 - RNA, 21 nt, Artificial Sequence
  LRRK2 RNA guide
gacccugcucaaacccggacu

SEQ ID NO: 96904 - RNA, 21 nt, Artificial Sequence
  LRRK2 RNA guide
gaccuuccugaaauucucagc

SEQ ID NO: 96905 - RNA, 21 nt, Artificial Sequence
  LRRK2 RNA guide
gacgaggaaacucugaagaag

SEQ ID NO: 96906 - RNA, 21 nt, Artificial Sequence
  LRRK2 RNA guide
gacguucaugcugggagggcg

SEQ ID NO: 96907 - RNA, 21 nt, Artificial Sequence
  LRRK2 RNA guide
gacuaucaacuucuucagagu

SEQ ID NO: 96908 - RNA, 21 nt, Artificial Sequence
  LRRK2 RNA guide
gacucuuaaggagccgcaaac

SEQ ID NO: 96909 - RNA, 21 nt, Artificial Sequence
  LRRK2 RNA guide
gacuuuucuccccguuucaga

SEQ ID NO: 96910 - RNA, 21 nt, Artificial Sequence
  LRRK2 RNA guide
gagaaaagucaaaaaggugaa

SEQ ID NO: 96911 - RNA, 21 nt, Artificial Sequence
  LRRK2 RNA guide
gagaaaguuugcaaaaauaaa

SEQ ID NO: 96912 - RNA, 21 nt, Artificial Sequence
  LRRK2 RNA guide
gagaauuucaggaaggucuuc

SEQ ID NO: 96913 - RNA, 21 nt, Artificial Sequence
  LRRK2 RNA guide
gagcagcggacguucaugcug

SEQ ID NO: 96914 - RNA, 21 nt, Artificial Sequence
  LRRK2 RNA guide
gagcagggucaaggggaggag

SEQ ID NO: 96915 - RNA, 21 nt, Artificial Sequence
  LRRK2 RNA guide
gagccgcaaacucccauaucc

SEQ ID NO: 96916 - RNA, 21 nt, Artificial Sequence
  LRRK2 RNA guide
gagcgcgguaaucacuugaaa

SEQ ID NO: 96917 - RNA, 21 nt, Artificial Sequence
  LRRK2 RNA guide
gagcgcuggcugcgggcggug

SEQ ID NO: 96918 - RNA, 21 nt, Artificial Sequence
  LRRK2 RNA guide
gagcucagcucaccgcccgca

SEQ ID NO: 96919 - RNA, 21 nt, Artificial Sequence
  LRRK2 RNA guide
gagcugagcucgcccccgggg

SEQ ID NO: 96920 - RNA, 21 nt, Artificial Sequence
  LRRK2 RNA guide
gaggaaacucugaagaaguug

SEQ ID NO: 96921 - RNA, 21 nt, Artificial Sequence
  LRRK2 RNA guide
gaggacaaaauuugcaaaugu

SEQ ID NO: 96922 - RNA, 21 nt, Artificial Sequence
  LRRK2 RNA guide
gaggacgaggaaacucugaag

SEQ ID NO: 96923 - RNA, 21 nt, Artificial Sequence
  LRRK2 RNA guide
gaggaggacaaaauuugcaaa

SEQ ID NO: 96924 - RNA, 21 nt, Artificial Sequence
  LRRK2 RNA guide
gaggaucugcugguguucacg

SEQ ID NO: 96925 - RNA, 21 nt, Artificial Sequence
  LRRK2 RNA guide
gagggcggcggguuggaagca

SEQ ID NO: 96926 - RNA, 21 nt, Artificial Sequence
  LRRK2 RNA guide
gagggggagaaaguuugcaaa

SEQ ID NO: 96927 - RNA, 21 nt, Artificial Sequence
  LRRK2 RNA guide
gaguacgugaacaccagcaga

SEQ ID NO: 96928 - RNA, 21 nt, Artificial Sequence
  LRRK2 RNA guide
gaguccggguuugagcagggu

SEQ ID NO: 96929 - RNA, 21 nt, Artificial Sequence
  LRRK2 RNA guide
gaguuuccucguccucuucgc

SEQ ID NO: 96930 - RNA, 21 nt, Artificial Sequence
  LRRK2 RNA guide
gaguuugcggcuccuuaagag

SEQ ID NO: 96931 - RNA, 21 nt, Artificial Sequence
  LRRK2 RNA guide
gauagaaacgcugguccaaau

SEQ ID NO: 96932 - RNA, 21 nt, Artificial Sequence
  LRRK2 RNA guide
gauagucaggcugaacaaugu

SEQ ID NO: 96933 - RNA, 21 nt, Artificial Sequence
  LRRK2 RNA guide
gauaugggaguuugcggcucc

SEQ ID NO: 96934 - RNA, 21 nt, Artificial Sequence
  LRRK2 RNA guide
gaucugcugguguucacguac

SEQ ID NO: 96935 - RNA, 21 nt, Artificial Sequence
  LRRK2 RNA guide
gauuaccgcgcucggaguacg

SEQ ID NO: 96936 - RNA, 21 nt, Artificial Sequence
  LRRK2 RNA guide
gauuuggaccagcguuucuau

SEQ ID NO: 96937 - RNA, 21 nt, Artificial Sequence
  LRRK2 RNA guide
gcaaacucccauauccuuucc

SEQ ID NO: 96938 - RNA, 21 nt, Artificial Sequence
  LRRK2 RNA guide
gcaaacuuucucccccuccuu

SEQ ID NO: 96939 - RNA, 21 nt, Artificial Sequence
  LRRK2 RNA guide
gcaaauguaaggagggggaga

SEQ ID NO: 96940 - RNA, 21 nt, Artificial Sequence
  LRRK2 RNA guide
gcaaauuuuguccuccucccc

SEQ ID NO: 96941 - RNA, 21 nt, Artificial Sequence
  LRRK2 RNA guide
gcacaguuuauuuucaaguga

SEQ ID NO: 96942 - RNA, 21 nt, Artificial Sequence
  LRRK2 RNA guide
gcaccccugacagcugccacu

SEQ ID NO: 96943 - RNA, 21 nt, Artificial Sequence
  LRRK2 RNA guide
gcaccugcuuccaacccgccg

SEQ ID NO: 96944 - RNA, 21 nt, Artificial Sequence
  LRRK2 RNA guide
gcagaaagcagcugagaauuu

SEQ ID NO: 96945 - RNA, 21 nt, Artificial Sequence
  LRRK2 RNA guide
gcagcggacguucaugcuggg

SEQ ID NO: 96946 - RNA, 21 nt, Artificial Sequence
  LRRK2 RNA guide
gcagcugagaauuucaggaag

SEQ ID NO: 96947 - RNA, 21 nt, Artificial Sequence
  LRRK2 RNA guide
gcagcugucaggggugcgaag

SEQ ID NO: 96948 - RNA, 21 nt, Artificial Sequence
  LRRK2 RNA guide
gcagggucaaggggaggagga

SEQ ID NO: 96949 - RNA, 21 nt, Artificial Sequence
  LRRK2 RNA guide
gcaggugccaccauggcuagu

SEQ ID NO: 96950 - RNA, 21 nt, Artificial Sequence
  LRRK2 RNA guide
gcaugaacguccgcugcucag

SEQ ID NO: 96951 - RNA, 21 nt, Artificial Sequence
  LRRK2 RNA guide
gccacagcuccccgggggcga

SEQ ID NO: 96952 - RNA, 21 nt, Artificial Sequence
  LRRK2 RNA guide
gccaccauggcuaguggcagc

SEQ ID NO: 96953 - RNA, 21 nt, Artificial Sequence
  LRRK2 RNA guide
gccacuagccaugguggcacc

SEQ ID NO: 96954 - RNA, 21 nt, Artificial Sequence
  LRRK2 RNA guide
gccaugguggcaccugcuucc

SEQ ID NO: 96955 - RNA, 21 nt, Artificial Sequence
  LRRK2 RNA guide
gcccuaaggaaaggauauggg

SEQ ID NO: 96956 - RNA, 21 nt, Artificial Sequence
  LRRK2 RNA guide
gcccucccagcaugaacgucc

SEQ ID NO: 96957 - RNA, 21 nt, Artificial Sequence
  LRRK2 RNA guide
gccgcaaacucccauauccuu

SEQ ID NO: 96958 - RNA, 21 nt, Artificial Sequence
  LRRK2 RNA guide
gccgguucccugagcagcgga

SEQ ID NO: 96959 - RNA, 21 nt, Artificial Sequence
  LRRK2 RNA guide
gccugacuaucaacuucuuca

SEQ ID NO: 96960 - RNA, 21 nt, Artificial Sequence
  LRRK2 RNA guide
gcgaagaggacgaggaaacuc

SEQ ID NO: 96961 - RNA, 21 nt, Artificial Sequence
  LRRK2 RNA guide
gcgagcucagcucaccgcccg

SEQ ID NO: 96962 - RNA, 21 nt, Artificial Sequence
  LRRK2 RNA guide
gcgccccugccgguucccuga

SEQ ID NO: 96963 - RNA, 21 nt, Artificial Sequence
  LRRK2 RNA guide
gcgcgguaaucacuugaaaau

SEQ ID NO: 96964 - RNA, 21 nt, Artificial Sequence
  LRRK2 RNA guide
gcgcucggaguacgugaacac

SEQ ID NO: 96965 - RNA, 21 nt, Artificial Sequence
  LRRK2 RNA guide
gcgcuggcugcgggcggugag

SEQ ID NO: 96966 - RNA, 21 nt, Artificial Sequence
  LRRK2 RNA guide
gcggacguucaugcugggagg

SEQ ID NO: 96967 - RNA, 21 nt, Artificial Sequence
  LRRK2 RNA guide
gcggcggguuggaagcaggug

SEQ ID NO: 96968 - RNA, 21 nt, Artificial Sequence
  LRRK2 RNA guide
gcggcuccuuaagaguccggg

SEQ ID NO: 96969 - RNA, 21 nt, Artificial Sequence
  LRRK2 RNA guide
gcggguuggaagcaggugcca

SEQ ID NO: 96970 - RNA, 21 nt, Artificial Sequence
  LRRK2 RNA guide
gcgguaaucacuugaaaauaa

SEQ ID NO: 96971 - RNA, 21 nt, Artificial Sequence
  LRRK2 RNA guide
gcguuucuaucuguuuuccuu

SEQ ID NO: 96972 - RNA, 21 nt, Artificial Sequence
  LRRK2 RNA guide
gcucaaacccggacucuuaag

SEQ ID NO: 96973 - RNA, 21 nt, Artificial Sequence
  LRRK2 RNA guide
gcucagcucaccgcccgcagc

SEQ ID NO: 96974 - RNA, 21 nt, Artificial Sequence
  LRRK2 RNA guide
gcuccccgggggcgagcucag

SEQ ID NO: 96975 - RNA, 21 nt, Artificial Sequence
  LRRK2 RNA guide
gcuccuuaagaguccggguuu

SEQ ID NO: 96976 - RNA, 21 nt, Artificial Sequence
  LRRK2 RNA guide
gcucggaguacgugaacacca

SEQ ID NO: 96977 - RNA, 21 nt, Artificial Sequence
  LRRK2 RNA guide
gcugaacaauguccaggaagg

SEQ ID NO: 96978 - RNA, 21 nt, Artificial Sequence
  LRRK2 RNA guide
gcugagaauuucaggaagguc

SEQ ID NO: 96979 - RNA, 21 nt, Artificial Sequence
  LRRK2 RNA guide
gcugagcucgcccccggggag

SEQ ID NO: 96980 - RNA, 21 nt, Artificial Sequence
  LRRK2 RNA guide
gcugccacuagccaugguggc

SEQ ID NO: 96981 - RNA, 21 nt, Artificial Sequence
  LRRK2 RNA guide
gcugcucagggaaccggcagg

SEQ ID NO: 96982 - RNA, 21 nt, Artificial Sequence
  LRRK2 RNA guide
gcugcuuucugcccuaaggaa

SEQ ID NO: 96983 - RNA, 21 nt, Artificial Sequence
  LRRK2 RNA guide
gcuggcugcgggcggugagcu

SEQ ID NO: 96984 - RNA, 21 nt, Artificial Sequence
  LRRK2 RNA guide
gcugggagggcggcggguugg

SEQ ID NO: 96985 - RNA, 21 nt, Artificial Sequence
  LRRK2 RNA guide
gcugguccaaauccuggagga

SEQ ID NO: 96986 - RNA, 21 nt, Artificial Sequence
  LRRK2 RNA guide
gcugguguucacguacuccga

SEQ ID NO: 96987 - RNA, 21 nt, Artificial Sequence
  LRRK2 RNA guide
gcugucaggggugcgaagagg

SEQ ID NO: 96988 - RNA, 21 nt, Artificial Sequence
  LRRK2 RNA guide
gcuuccaacccgccgcccucc

SEQ ID NO: 96989 - RNA, 21 nt, Artificial Sequence
  LRRK2 RNA guide
gcuuucugcccuaaggaaagg

SEQ ID NO: 96990 - RNA, 21 nt, Artificial Sequence
  LRRK2 RNA guide
gcuuuuauuuuugcaaacuuu

SEQ ID NO: 96991 - RNA, 21 nt, Artificial Sequence
  LRRK2 RNA guide
ggaaaacagauagaaacgcug

SEQ ID NO: 96992 - RNA, 21 nt, Artificial Sequence
  LRRK2 RNA guide
ggaaacucugaagaaguugau

SEQ ID NO: 96993 - RNA, 21 nt, Artificial Sequence
  LRRK2 RNA guide
ggaaaggauaugggaguuugc

SEQ ID NO: 96994 - RNA, 21 nt, Artificial Sequence
  LRRK2 RNA guide
ggaagcaggugccaccauggc

SEQ ID NO: 96995 - RNA, 21 nt, Artificial Sequence
  LRRK2 RNA guide
ggaaggucuucaccuuuuuga

SEQ ID NO: 96996 - RNA, 21 nt, Artificial Sequence
  LRRK2 RNA guide
ggacaaaauuugcaaauguaa

SEQ ID NO: 96997 - RNA, 21 nt, Artificial Sequence
  LRRK2 RNA guide
ggacauuguucagccugacua

SEQ ID NO: 96998 - RNA, 21 nt, Artificial Sequence
  LRRK2 RNA guide
ggaccagcguuucuaucuguu

SEQ ID NO: 96999 - RNA, 21 nt, Artificial Sequence
  LRRK2 RNA guide
ggacgaggaaacucugaagaa

SEQ ID NO: 97000 - RNA, 21 nt, Artificial Sequence
  LRRK2 RNA guide
ggacguucaugcugggagggc

SEQ ID NO: 97001 - RNA, 21 nt, Artificial Sequence
  LRRK2 RNA guide
ggacucuuaaggagccgcaaa

SEQ ID NO: 97002 - RNA, 21 nt, Artificial Sequence
  LRRK2 RNA guide
ggagaaaagucaaaaagguga

SEQ ID NO: 97003 - RNA, 21 nt, Artificial Sequence
  LRRK2 RNA guide
ggagaaaguuugcaaaaauaa

SEQ ID NO: 97004 - RNA, 21 nt, Artificial Sequence
  LRRK2 RNA guide
ggagccgcaaacucccauauc

SEQ ID NO: 97005 - RNA, 21 nt, Artificial Sequence
  LRRK2 RNA guide
ggagcgcuggcugcgggcggu

SEQ ID NO: 97006 - RNA, 21 nt, Artificial Sequence
  LRRK2 RNA guide
ggaggacaaaauuugcaaaug

SEQ ID NO: 97007 - RNA, 21 nt, Artificial Sequence
  LRRK2 RNA guide
ggaggaggacaaaauuugcaa

SEQ ID NO: 97008 - RNA, 21 nt, Artificial Sequence
  LRRK2 RNA guide
ggaggaucugcugguguucac

SEQ ID NO: 97009 - RNA, 21 nt, Artificial Sequence
  LRRK2 RNA guide
ggagggcggcggguuggaagc

SEQ ID NO: 97010 - RNA, 21 nt, Artificial Sequence
  LRRK2 RNA guide
ggagggggagaaaguuugcaa

SEQ ID NO: 97011 - RNA, 21 nt, Artificial Sequence
  LRRK2 RNA guide
ggaguacgugaacaccagcag

SEQ ID NO: 97012 - RNA, 21 nt, Artificial Sequence
  LRRK2 RNA guide
ggaguuugcggcuccuuaaga

SEQ ID NO: 97013 - RNA, 21 nt, Artificial Sequence
  LRRK2 RNA guide
ggauaugggaguuugcggcuc

SEQ ID NO: 97014 - RNA, 21 nt, Artificial Sequence
  LRRK2 RNA guide
ggaucugcugguguucacgua

SEQ ID NO: 97015 - RNA, 21 nt, Artificial Sequence
  LRRK2 RNA guide
ggauuuggaccagcguuucua

SEQ ID NO: 97016 - RNA, 21 nt, Artificial Sequence
  LRRK2 RNA guide
ggcaccugcuuccaacccgcc

SEQ ID NO: 97017 - RNA, 21 nt, Artificial Sequence
  LRRK2 RNA guide
ggcagaaagcagcugagaauu

SEQ ID NO: 97018 - RNA, 21 nt, Artificial Sequence
  LRRK2 RNA guide
ggcagcugucaggggugcgaa

SEQ ID NO: 97019 - RNA, 21 nt, Artificial Sequence
  LRRK2 RNA guide
ggcgagcucagcucaccgccc

SEQ ID NO: 97020 - RNA, 21 nt, Artificial Sequence
  LRRK2 RNA guide
ggcgccccugccgguucccug

SEQ ID NO: 97021 - RNA, 21 nt, Artificial Sequence
  LRRK2 RNA guide
ggcggcggguuggaagcaggu

SEQ ID NO: 97022 - RNA, 21 nt, Artificial Sequence
  LRRK2 RNA guide
ggcggguuggaagcaggugcc

SEQ ID NO: 97023 - RNA, 21 nt, Artificial Sequence
  LRRK2 RNA guide
ggcuccuuaagaguccggguu

SEQ ID NO: 97024 - RNA, 21 nt, Artificial Sequence
  LRRK2 RNA guide
ggcugaacaauguccaggaag

SEQ ID NO: 97025 - RNA, 21 nt, Artificial Sequence
  LRRK2 RNA guide
gggagaaaagucaaaaaggug

SEQ ID NO: 97026 - RNA, 21 nt, Artificial Sequence
  LRRK2 RNA guide
gggagaaaguuugcaaaaaua

SEQ ID NO: 97027 - RNA, 21 nt, Artificial Sequence
  LRRK2 RNA guide
gggaggaggacaaaauuugca

SEQ ID NO: 97028 - RNA, 21 nt, Artificial Sequence
  LRRK2 RNA guide
gggagggcggcggguuggaag

SEQ ID NO: 97029 - RNA, 21 nt, Artificial Sequence
  LRRK2 RNA guide
gggaguuugcggcuccuuaag

SEQ ID NO: 97030 - RNA, 21 nt, Artificial Sequence
  LRRK2 RNA guide
gggcagaaagcagcugagaau

SEQ ID NO: 97031 - RNA, 21 nt, Artificial Sequence
  LRRK2 RNA guide
gggcgagcucagcucaccgcc

SEQ ID NO: 97032 - RNA, 21 nt, Artificial Sequence
  LRRK2 RNA guide
gggcggcggguuggaagcagg

SEQ ID NO: 97033 - RNA, 21 nt, Artificial Sequence
  LRRK2 RNA guide
ggggagaaaagucaaaaaggu

SEQ ID NO: 97034 - RNA, 21 nt, Artificial Sequence
  LRRK2 RNA guide
ggggagaaaguuugcaaaaau

SEQ ID NO: 97035 - RNA, 21 nt, Artificial Sequence
  LRRK2 RNA guide
ggggaggaggacaaaauuugc

SEQ ID NO: 97036 - RNA, 21 nt, Artificial Sequence
  LRRK2 RNA guide
ggggcgagcucagcucaccgc

SEQ ID NO: 97037 - RNA, 21 nt, Artificial Sequence
  LRRK2 RNA guide
gggggagaaaguuugcaaaaa

SEQ ID NO: 97038 - RNA, 21 nt, Artificial Sequence
  LRRK2 RNA guide
ggggugcgaagaggacgagga

SEQ ID NO: 97039 - RNA, 21 nt, Artificial Sequence
  LRRK2 RNA guide
gggucaaggggaggaggacaa

SEQ ID NO: 97040 - RNA, 21 nt, Artificial Sequence
  LRRK2 RNA guide
gggugcgaagaggacgaggaa

SEQ ID NO: 97041 - RNA, 21 nt, Artificial Sequence
  LRRK2 RNA guide
ggguuggaagcaggugccacc

SEQ ID NO: 97042 - RNA, 21 nt, Artificial Sequence
  LRRK2 RNA guide
ggguuugagcagggucaaggg

SEQ ID NO: 97043 - RNA, 21 nt, Artificial Sequence
  LRRK2 RNA guide
gguaaucacuugaaaauaaac

SEQ ID NO: 97044 - RNA, 21 nt, Artificial Sequence
  LRRK2 RNA guide
ggucaaggggaggaggacaaa

SEQ ID NO: 97045 - RNA, 21 nt, Artificial Sequence
  LRRK2 RNA guide
gguccaaauccuggaggaucu

SEQ ID NO: 97046 - RNA, 21 nt, Artificial Sequence
  LRRK2 RNA guide
ggucuucaccuuuuugacuuu

SEQ ID NO: 97047 - RNA, 21 nt, Artificial Sequence
  LRRK2 RNA guide
ggugaagaccuuccugaaauu

SEQ ID NO: 97048 - RNA, 21 nt, Artificial Sequence
  LRRK2 RNA guide
ggugagcugagcucgcccccg

SEQ ID NO: 97049 - RNA, 21 nt, Artificial Sequence
  LRRK2 RNA guide
ggugccaccauggcuaguggc

SEQ ID NO: 97050 - RNA, 21 nt, Artificial Sequence
  LRRK2 RNA guide
ggugcgaagaggacgaggaaa

SEQ ID NO: 97051 - RNA, 21 nt, Artificial Sequence
  LRRK2 RNA guide
gguggcaccugcuuccaaccc

SEQ ID NO: 97052 - RNA, 21 nt, Artificial Sequence
  LRRK2 RNA guide
gguguucacguacuccgagcg

SEQ ID NO: 97053 - RNA, 21 nt, Artificial Sequence
  LRRK2 RNA guide
gguucccugagcagcggacgu

SEQ ID NO: 97054 - RNA, 21 nt, Artificial Sequence
  LRRK2 RNA guide
gguuggaagcaggugccacca

SEQ ID NO: 97055 - RNA, 21 nt, Artificial Sequence
  LRRK2 RNA guide
gguuugagcagggucaagggg

SEQ ID NO: 97056 - RNA, 21 nt, Artificial Sequence
  LRRK2 RNA guide
guaaggagggggagaaaguuu

SEQ ID NO: 97057 - RNA, 21 nt, Artificial Sequence
  LRRK2 RNA guide
guaaucacuugaaaauaaacu

SEQ ID NO: 97058 - RNA, 21 nt, Artificial Sequence
  LRRK2 RNA guide
guacgugaacaccagcagauc

SEQ ID NO: 97059 - RNA, 21 nt, Artificial Sequence
  LRRK2 RNA guide
guacuccgagcgcgguaauca

SEQ ID NO: 97060 - RNA, 21 nt, Artificial Sequence
  LRRK2 RNA guide
gucaaaaaggugaagaccuuc

SEQ ID NO: 97061 - RNA, 21 nt, Artificial Sequence
  LRRK2 RNA guide
gucaaggggaggaggacaaaa

SEQ ID NO: 97062 - RNA, 21 nt, Artificial Sequence
  LRRK2 RNA guide
gucaggcugaacaauguccag

SEQ ID NO: 97063 - RNA, 21 nt, Artificial Sequence
  LRRK2 RNA guide
gucaggggugcgaagaggacg

SEQ ID NO: 97064 - RNA, 21 nt, Artificial Sequence
  LRRK2 RNA guide
guccaaauccuggaggaucug

SEQ ID NO: 97065 - RNA, 21 nt, Artificial Sequence
  LRRK2 RNA guide
guccaggaaggaaaacagaua

SEQ ID NO: 97066 - RNA, 21 nt, Artificial Sequence
  LRRK2 RNA guide
guccgcugcucagggaaccgg

SEQ ID NO: 97067 - RNA, 21 nt, Artificial Sequence
  LRRK2 RNA guide
guccggguuugagcaggguca

SEQ ID NO: 97068 - RNA, 21 nt, Artificial Sequence
  LRRK2 RNA guide
guccuccuccccuugacccug

SEQ ID NO: 97069 - RNA, 21 nt, Artificial Sequence
  LRRK2 RNA guide
guccucuucgcaccccugaca

SEQ ID NO: 97070 - RNA, 21 nt, Artificial Sequence
  LRRK2 RNA guide
gucugaaacggggagaaaagu

SEQ ID NO: 97071 - RNA, 21 nt, Artificial Sequence
  LRRK2 RNA guide
gucuucaccuuuuugacuuuu

SEQ ID NO: 97072 - RNA, 21 nt, Artificial Sequence
  LRRK2 RNA guide
gugaacaccagcagauccucc

SEQ ID NO: 97073 - RNA, 21 nt, Artificial Sequence
  LRRK2 RNA guide
gugaagaccuuccugaaauuc

SEQ ID NO: 97074 - RNA, 21 nt, Artificial Sequence
  LRRK2 RNA guide
gugagcugagcucgcccccgg

SEQ ID NO: 97075 - RNA, 21 nt, Artificial Sequence
  LRRK2 RNA guide
gugauuaccgcgcucggagua

SEQ ID NO: 97076 - RNA, 21 nt, Artificial Sequence
  LRRK2 RNA guide
gugccaccauggcuaguggca

SEQ ID NO: 97077 - RNA, 21 nt, Artificial Sequence
  LRRK2 RNA guide
gugcgaagaggacgaggaaac

SEQ ID NO: 97078 - RNA, 21 nt, Artificial Sequence
  LRRK2 RNA guide
gugcuuuuauuuuugcaaacu

SEQ ID NO: 97079 - RNA, 21 nt, Artificial Sequence
  LRRK2 RNA guide
guggcaccugcuuccaacccg

SEQ ID NO: 97080 - RNA, 21 nt, Artificial Sequence
  LRRK2 RNA guide
guggcagcugucaggggugcg

SEQ ID NO: 97081 - RNA, 21 nt, Artificial Sequence
  LRRK2 RNA guide
guguucacguacuccgagcgc

SEQ ID NO: 97082 - RNA, 21 nt, Artificial Sequence
  LRRK2 RNA guide
guucacguacuccgagcgcgg

SEQ ID NO: 97083 - RNA, 21 nt, Artificial Sequence
  LRRK2 RNA guide
guucagccugacuaucaacuu

SEQ ID NO: 97084 - RNA, 21 nt, Artificial Sequence
  LRRK2 RNA guide
guucaugcugggagggcggcg

SEQ ID NO: 97085 - RNA, 21 nt, Artificial Sequence
  LRRK2 RNA guide
guucccugagcagcggacguu

SEQ ID NO: 97086 - RNA, 21 nt, Artificial Sequence
  LRRK2 RNA guide
guugauagucaggcugaacaa

SEQ ID NO: 97087 - RNA, 21 nt, Artificial Sequence
  LRRK2 RNA guide
guuggaagcaggugccaccau

SEQ ID NO: 97088 - RNA, 21 nt, Artificial Sequence
  LRRK2 RNA guide
guuuauuuucaagugauuacc

SEQ ID NO: 97089 - RNA, 21 nt, Artificial Sequence
  LRRK2 RNA guide
guuuccucguccucuucgcac

SEQ ID NO: 97090 - RNA, 21 nt, Artificial Sequence
  LRRK2 RNA guide
guuucuaucuguuuuccuucc

SEQ ID NO: 97091 - RNA, 21 nt, Artificial Sequence
  LRRK2 RNA guide
guuugagcagggucaagggga

SEQ ID NO: 97092 - RNA, 21 nt, Artificial Sequence
  LRRK2 RNA guide
guuugcggcuccuuaagaguc

SEQ ID NO: 97093 - RNA, 21 nt, Artificial Sequence
  LRRK2 RNA guide
guuuuccuuccuggacauugu

SEQ ID NO: 97094 - RNA, 21 nt, Artificial Sequence
  LRRK2 RNA guide
uaagaguccggguuugagcag

SEQ ID NO: 97095 - RNA, 21 nt, Artificial Sequence
  LRRK2 RNA guide
uaaggaaaggauaugggaguu

SEQ ID NO: 97096 - RNA, 21 nt, Artificial Sequence
  LRRK2 RNA guide
uaaggagccgcaaacucccau

SEQ ID NO: 97097 - RNA, 21 nt, Artificial Sequence
  LRRK2 RNA guide
uaaggagggggagaaaguuug

SEQ ID NO: 97098 - RNA, 21 nt, Artificial Sequence
  LRRK2 RNA guide
uacauuugcaaauuuuguccu

SEQ ID NO: 97099 - RNA, 21 nt, Artificial Sequence
  LRRK2 RNA guide
uaccgcgcucggaguacguga

SEQ ID NO: 97100 - RNA, 21 nt, Artificial Sequence
  LRRK2 RNA guide
uacgugaacaccagcagaucc

SEQ ID NO: 97101 - RNA, 21 nt, Artificial Sequence
  LRRK2 RNA guide
uacuccgagcgcgguaaucac

SEQ ID NO: 97102 - RNA, 21 nt, Artificial Sequence
  LRRK2 RNA guide
uagaaacgcugguccaaaucc

SEQ ID NO: 97103 - RNA, 21 nt, Artificial Sequence
  LRRK2 RNA guide
uagccaugguggcaccugcuu

SEQ ID NO: 97104 - RNA, 21 nt, Artificial Sequence
  LRRK2 RNA guide
uagggcagaaagcagcugaga

SEQ ID NO: 97105 - RNA, 21 nt, Artificial Sequence
  LRRK2 RNA guide
uagucaggcugaacaaugucc

SEQ ID NO: 97106 - RNA, 21 nt, Artificial Sequence
  LRRK2 RNA guide
uagucugaaacggggagaaaa

SEQ ID NO: 97107 - RNA, 21 nt, Artificial Sequence
  LRRK2 RNA guide
uaucaacuucuucagaguuuc

SEQ ID NO: 97108 - RNA, 21 nt, Artificial Sequence
  LRRK2 RNA guide
uauccuuuccuuagggcagaa

SEQ ID NO: 97109 - RNA, 21 nt, Artificial Sequence
  LRRK2 RNA guide
uaucuguuuuccuuccuggac

SEQ ID NO: 97110 - RNA, 21 nt, Artificial Sequence
  LRRK2 RNA guide
uaugggaguuugcggcuccuu

SEQ ID NO: 97111 - RNA, 21 nt, Artificial Sequence
  LRRK2 RNA guide
uauuuucaagugauuaccgcg

SEQ ID NO: 97112 - RNA, 21 nt, Artificial Sequence
  LRRK2 RNA guide
uauuuuugcaaacuuucuccc

SEQ ID NO: 97113 - RNA, 21 nt, Artificial Sequence
  LRRK2 RNA guide
ucaaaaaggugaagaccuucc

SEQ ID NO: 97114 - RNA, 21 nt, Artificial Sequence
  LRRK2 RNA guide
ucaaacccggacucuuaagga

SEQ ID NO: 97115 - RNA, 21 nt, Artificial Sequence
  LRRK2 RNA guide
ucaacuucuucagaguuuccu

SEQ ID NO: 97116 - RNA, 21 nt, Artificial Sequence
  LRRK2 RNA guide
ucaaggggaggaggacaaaau

SEQ ID NO: 97117 - RNA, 21 nt, Artificial Sequence
  LRRK2 RNA guide
ucaagugauuaccgcgcucgg

SEQ ID NO: 97118 - RNA, 21 nt, Artificial Sequence
  LRRK2 RNA guide
ucaccuuuuugacuuuucucc

SEQ ID NO: 97119 - RNA, 21 nt, Artificial Sequence
  LRRK2 RNA guide
ucacguacuccgagcgcggua

SEQ ID NO: 97120 - RNA, 21 nt, Artificial Sequence
  LRRK2 RNA guide
ucagccugacuaucaacuucu

SEQ ID NO: 97121 - RNA, 21 nt, Artificial Sequence
  LRRK2 RNA guide
ucagcucaccgcccgcagcca

SEQ ID NO: 97122 - RNA, 21 nt, Artificial Sequence
  LRRK2 RNA guide
ucagcugcuuucugcccuaag

SEQ ID NO: 97123 - RNA, 21 nt, Artificial Sequence
  LRRK2 RNA guide
ucaggaaggucuucaccuuuu

SEQ ID NO: 97124 - RNA, 21 nt, Artificial Sequence
  LRRK2 RNA guide
ucaggcugaacaauguccagg

SEQ ID NO: 97125 - RNA, 21 nt, Artificial Sequence
  LRRK2 RNA guide
ucaggggugcgaagaggacga

SEQ ID NO: 97126 - RNA, 21 nt, Artificial Sequence
  LRRK2 RNA guide
ucaugcugggagggcggcggg

SEQ ID NO: 97127 - RNA, 21 nt, Artificial Sequence
  LRRK2 RNA guide
uccaaauccuggaggaucugc

SEQ ID NO: 97128 - RNA, 21 nt, Artificial Sequence
  LRRK2 RNA guide
uccaacccgccgcccucccag

SEQ ID NO: 97129 - RNA, 21 nt, Artificial Sequence
  LRRK2 RNA guide
uccaggauuuggaccagcguu

SEQ ID NO: 97130 - RNA, 21 nt, Artificial Sequence
  LRRK2 RNA guide
ucccagcaugaacguccgcug

SEQ ID NO: 97131 - RNA, 21 nt, Artificial Sequence
  LRRK2 RNA guide
ucccauauccuuuccuuaggg

SEQ ID NO: 97132 - RNA, 21 nt, Artificial Sequence
  LRRK2 RNA guide
ucccccuccuuacauuugcaa

SEQ ID NO: 97133 - RNA, 21 nt, Artificial Sequence
  LRRK2 RNA guide
uccccgggggcgagcucagcu

SEQ ID NO: 97134 - RNA, 21 nt, Artificial Sequence
  LRRK2 RNA guide
uccccuugacccugcucaaac

SEQ ID NO: 97135 - RNA, 21 nt, Artificial Sequence
  LRRK2 RNA guide
ucccugagcagcggacguuca

SEQ ID NO: 97136 - RNA, 21 nt, Artificial Sequence
  LRRK2 RNA guide
uccgagcgcgguaaucacuug

SEQ ID NO: 97137 - RNA, 21 nt, Artificial Sequence
  LRRK2 RNA guide
uccgcugcucagggaaccggc

SEQ ID NO: 97138 - RNA, 21 nt, Artificial Sequence
  LRRK2 RNA guide
uccggguuugagcagggucaa

SEQ ID NO: 97139 - RNA, 21 nt, Artificial Sequence
  LRRK2 RNA guide
uccuccaggauuuggaccagc

SEQ ID NO: 97140 - RNA, 21 nt, Artificial Sequence
  LRRK2 RNA guide
uccuccccuugacccugcuca

SEQ ID NO: 97141 - RNA, 21 nt, Artificial Sequence
  LRRK2 RNA guide
uccuccuccccuugacccugc

SEQ ID NO: 97142 - RNA, 21 nt, Artificial Sequence
  LRRK2 RNA guide
uccucguccucuucgcacccc

SEQ ID NO: 97143 - RNA, 21 nt, Artificial Sequence
  LRRK2 RNA guide
uccucuucgcaccccugacag

SEQ ID NO: 97144 - RNA, 21 nt, Artificial Sequence
  LRRK2 RNA guide
uccugaaauucucagcugcuu

SEQ ID NO: 97145 - RNA, 21 nt, Artificial Sequence
  LRRK2 RNA guide
uccuggacauuguucagccug

SEQ ID NO: 97146 - RNA, 21 nt, Artificial Sequence
  LRRK2 RNA guide
uccuggaggaucugcuggugu

SEQ ID NO: 97147 - RNA, 21 nt, Artificial Sequence
  LRRK2 RNA guide
uccuuaagaguccggguuuga

SEQ ID NO: 97148 - RNA, 21 nt, Artificial Sequence
  LRRK2 RNA guide
uccuuacauuugcaaauuuug

SEQ ID NO: 97149 - RNA, 21 nt, Artificial Sequence
  LRRK2 RNA guide
uccuuagggcagaaagcagcu

SEQ ID NO: 97150 - RNA, 21 nt, Artificial Sequence
  LRRK2 RNA guide
uccuuccuggacauuguucag

SEQ ID NO: 97151 - RNA, 21 nt, Artificial Sequence
  LRRK2 RNA guide
uccuuuccuuagggcagaaag

SEQ ID NO: 97152 - RNA, 21 nt, Artificial Sequence
  LRRK2 RNA guide
ucgcaccccugacagcugcca

SEQ ID NO: 97153 - RNA, 21 nt, Artificial Sequence
  LRRK2 RNA guide
ucggaguacgugaacaccagc

SEQ ID NO: 97154 - RNA, 21 nt, Artificial Sequence
  LRRK2 RNA guide
ucguccucuucgcaccccuga

SEQ ID NO: 97155 - RNA, 21 nt, Artificial Sequence
  LRRK2 RNA guide
ucuaucuguuuuccuuccugg

SEQ ID NO: 97156 - RNA, 21 nt, Artificial Sequence
  LRRK2 RNA guide
ucucagcugcuuucugcccua

SEQ ID NO: 97157 - RNA, 21 nt, Artificial Sequence
  LRRK2 RNA guide
ucucccccuccuuacauuugc

SEQ ID NO: 97158 - RNA, 21 nt, Artificial Sequence
  LRRK2 RNA guide
ucugaaacggggagaaaaguc

SEQ ID NO: 97159 - RNA, 21 nt, Artificial Sequence
  LRRK2 RNA guide
ucugaagaaguugauagucag

SEQ ID NO: 97160 - RNA, 21 nt, Artificial Sequence
  LRRK2 RNA guide
ucugcccuaaggaaaggauau

SEQ ID NO: 97161 - RNA, 21 nt, Artificial Sequence
  LRRK2 RNA guide
ucugcugguguucacguacuc

SEQ ID NO: 97162 - RNA, 21 nt, Artificial Sequence
  LRRK2 RNA guide
ucuguuuuccuuccuggacau

SEQ ID NO: 97163 - RNA, 21 nt, Artificial Sequence
  LRRK2 RNA guide
ucuuaaggagccgcaaacucc

SEQ ID NO: 97164 - RNA, 21 nt, Artificial Sequence
  LRRK2 RNA guide
ucuucaccuuuuugacuuuuc

SEQ ID NO: 97165 - RNA, 21 nt, Artificial Sequence
  LRRK2 RNA guide
ucuucgcaccccugacagcug

SEQ ID NO: 97166 - RNA, 21 nt, Artificial Sequence
  LRRK2 RNA guide
ugaaacggggagaaaagucaa

SEQ ID NO: 97167 - RNA, 21 nt, Artificial Sequence
  LRRK2 RNA guide
ugaaauucucagcugcuuucu

SEQ ID NO: 97168 - RNA, 21 nt, Artificial Sequence
  LRRK2 RNA guide
ugaacaauguccaggaaggaa

SEQ ID NO: 97169 - RNA, 21 nt, Artificial Sequence
  LRRK2 RNA guide
ugaacaccagcagauccucca

SEQ ID NO: 97170 - RNA, 21 nt, Artificial Sequence
  LRRK2 RNA guide
ugaacguccgcugcucaggga

SEQ ID NO: 97171 - RNA, 21 nt, Artificial Sequence
  LRRK2 RNA guide
ugaagaaguugauagucaggc

SEQ ID NO: 97172 - RNA, 21 nt, Artificial Sequence
  LRRK2 RNA guide
ugaagaccuuccugaaauucu

SEQ ID NO: 97173 - RNA, 21 nt, Artificial Sequence
  LRRK2 RNA guide
ugacagcugccacuagccaug

SEQ ID NO: 97174 - RNA, 21 nt, Artificial Sequence
  LRRK2 RNA guide
ugacccugcucaaacccggac

SEQ ID NO: 97175 - RNA, 21 nt, Artificial Sequence
  LRRK2 RNA guide
ugacuaucaacuucuucagag

SEQ ID NO: 97176 - RNA, 21 nt, Artificial Sequence
  LRRK2 RNA guide
ugacuuuucuccccguuucag

SEQ ID NO: 97177 - RNA, 21 nt, Artificial Sequence
  LRRK2 RNA guide
ugagaauuucaggaaggucuu

SEQ ID NO: 97178 - RNA, 21 nt, Artificial Sequence
  LRRK2 RNA guide
ugagcagcggacguucaugcu

SEQ ID NO: 97179 - RNA, 21 nt, Artificial Sequence
  LRRK2 RNA guide
ugagcagggucaaggggagga

SEQ ID NO: 97180 - RNA, 21 nt, Artificial Sequence
  LRRK2 RNA guide
ugagcugagcucgcccccggg

SEQ ID NO: 97181 - RNA, 21 nt, Artificial Sequence
  LRRK2 RNA guide
ugauagucaggcugaacaaug

SEQ ID NO: 97182 - RNA, 21 nt, Artificial Sequence
  LRRK2 RNA guide
ugauuaccgcgcucggaguac

SEQ ID NO: 97183 - RNA, 21 nt, Artificial Sequence
  LRRK2 RNA guide
ugcaaacuuucucccccuccu

SEQ ID NO: 97184 - RNA, 21 nt, Artificial Sequence
  LRRK2 RNA guide
ugcaaauguaaggagggggag

SEQ ID NO: 97185 - RNA, 21 nt, Artificial Sequence
  LRRK2 RNA guide
ugcaaauuuuguccuccuccc

SEQ ID NO: 97186 - RNA, 21 nt, Artificial Sequence
  LRRK2 RNA guide
ugccaccauggcuaguggcag

SEQ ID NO: 97187 - RNA, 21 nt, Artificial Sequence
  LRRK2 RNA guide
ugccacuagccaugguggcac

SEQ ID NO: 97188 - RNA, 21 nt, Artificial Sequence
  LRRK2 RNA guide
ugcccuaaggaaaggauaugg

SEQ ID NO: 97189 - RNA, 21 nt, Artificial Sequence
  LRRK2 RNA guide
ugccgguucccugagcagcgg

SEQ ID NO: 97190 - RNA, 21 nt, Artificial Sequence
  LRRK2 RNA guide
ugcgaagaggacgaggaaacu

SEQ ID NO: 97191 - RNA, 21 nt, Artificial Sequence
  LRRK2 RNA guide
ugcggcuccuuaagaguccgg

SEQ ID NO: 97192 - RNA, 21 nt, Artificial Sequence
  LRRK2 RNA guide
ugcucaaacccggacucuuaa

SEQ ID NO: 97193 - RNA, 21 nt, Artificial Sequence
  LRRK2 RNA guide
ugcucagggaaccggcagggg

SEQ ID NO: 97194 - RNA, 21 nt, Artificial Sequence
  LRRK2 RNA guide
ugcugggagggcggcggguug

SEQ ID NO: 97195 - RNA, 21 nt, Artificial Sequence
  LRRK2 RNA guide
ugcugguguucacguacuccg

SEQ ID NO: 97196 - RNA, 21 nt, Artificial Sequence
  LRRK2 RNA guide
ugcuuccaacccgccgcccuc

SEQ ID NO: 97197 - RNA, 21 nt, Artificial Sequence
  LRRK2 RNA guide
ugcuuucugcccuaaggaaag

SEQ ID NO: 97198 - RNA, 21 nt, Artificial Sequence
  LRRK2 RNA guide
ugcuuuuauuuuugcaaacuu

SEQ ID NO: 97199 - RNA, 21 nt, Artificial Sequence
  LRRK2 RNA guide
uggaagcaggugccaccaugg

SEQ ID NO: 97200 - RNA, 21 nt, Artificial Sequence
  LRRK2 RNA guide
uggacauuguucagccugacu

SEQ ID NO: 97201 - RNA, 21 nt, Artificial Sequence
  LRRK2 RNA guide
uggaccagcguuucuaucugu

SEQ ID NO: 97202 - RNA, 21 nt, Artificial Sequence
  LRRK2 RNA guide
uggaggaucugcugguguuca

SEQ ID NO: 97203 - RNA, 21 nt, Artificial Sequence
  LRRK2 RNA guide
uggcaccugcuuccaacccgc

SEQ ID NO: 97204 - RNA, 21 nt, Artificial Sequence
  LRRK2 RNA guide
uggcagcugucaggggugcga

SEQ ID NO: 97205 - RNA, 21 nt, Artificial Sequence
  LRRK2 RNA guide
uggcuaguggcagcugucagg

SEQ ID NO: 97206 - RNA, 21 nt, Artificial Sequence
  LRRK2 RNA guide
uggcugcgggcggugagcuga

SEQ ID NO: 97207 - RNA, 21 nt, Artificial Sequence
  LRRK2 RNA guide
ugggagggcggcggguuggaa

SEQ ID NO: 97208 - RNA, 21 nt, Artificial Sequence
  LRRK2 RNA guide
ugggaguuugcggcuccuuaa

SEQ ID NO: 97209 - RNA, 21 nt, Artificial Sequence
  LRRK2 RNA guide
ugguccaaauccuggaggauc

SEQ ID NO: 97210 - RNA, 21 nt, Artificial Sequence
  LRRK2 RNA guide
ugguggcaccugcuuccaacc

SEQ ID NO: 97211 - RNA, 21 nt, Artificial Sequence
  LRRK2 RNA guide
ugguguucacguacuccgagc

SEQ ID NO: 97212 - RNA, 21 nt, Artificial Sequence
  LRRK2 RNA guide
uguaaggagggggagaaaguu

SEQ ID NO: 97213 - RNA, 21 nt, Artificial Sequence
  LRRK2 RNA guide
ugucaggggugcgaagaggac

SEQ ID NO: 97214 - RNA, 21 nt, Artificial Sequence
  LRRK2 RNA guide
uguccaggaaggaaaacagau

SEQ ID NO: 97215 - RNA, 21 nt, Artificial Sequence
  LRRK2 RNA guide
uguccuccuccccuugacccu

SEQ ID NO: 97216 - RNA, 21 nt, Artificial Sequence
  LRRK2 RNA guide
uguucacguacuccgagcgcg

SEQ ID NO: 97217 - RNA, 21 nt, Artificial Sequence
  LRRK2 RNA guide
uguucagccugacuaucaacu

SEQ ID NO: 97218 - RNA, 21 nt, Artificial Sequence
  LRRK2 RNA guide
uguuuuccuuccuggacauug

SEQ ID NO: 97219 - RNA, 21 nt, Artificial Sequence
  LRRK2 RNA guide
uuaagaguccggguuugagca

SEQ ID NO: 97220 - RNA, 21 nt, Artificial Sequence
  LRRK2 RNA guide
uuaaggagccgcaaacuccca

SEQ ID NO: 97221 - RNA, 21 nt, Artificial Sequence
  LRRK2 RNA guide
uuacauuugcaaauuuugucc

SEQ ID NO: 97222 - RNA, 21 nt, Artificial Sequence
  LRRK2 RNA guide
uuaccgcgcucggaguacgug

SEQ ID NO: 97223 - RNA, 21 nt, Artificial Sequence
  LRRK2 RNA guide
uuagggcagaaagcagcugag

SEQ ID NO: 97224 - RNA, 21 nt, Artificial Sequence
  LRRK2 RNA guide
uuagucugaaacggggagaaa

SEQ ID NO: 97225 - RNA, 21 nt, Artificial Sequence
  LRRK2 RNA guide
uuauuuucaagugauuaccgc

SEQ ID NO: 97226 - RNA, 21 nt, Artificial Sequence
  LRRK2 RNA guide
uuauuuuugcaaacuuucucc

SEQ ID NO: 97227 - RNA, 21 nt, Artificial Sequence
  LRRK2 RNA guide
uucaagugauuaccgcgcucg

SEQ ID NO: 97228 - RNA, 21 nt, Artificial Sequence
  LRRK2 RNA guide
uucaccuuuuugacuuuucuc

SEQ ID NO: 97229 - RNA, 21 nt, Artificial Sequence
  LRRK2 RNA guide
uucacguacuccgagcgcggu

SEQ ID NO: 97230 - RNA, 21 nt, Artificial Sequence
  LRRK2 RNA guide
uucagccugacuaucaacuuc

SEQ ID NO: 97231 - RNA, 21 nt, Artificial Sequence
  LRRK2 RNA guide
uucaggaaggucuucaccuuu

SEQ ID NO: 97232 - RNA, 21 nt, Artificial Sequence
  LRRK2 RNA guide
uucaugcugggagggcggcgg

SEQ ID NO: 97233 - RNA, 21 nt, Artificial Sequence
  LRRK2 RNA guide
uuccaacccgccgcccuccca

SEQ ID NO: 97234 - RNA, 21 nt, Artificial Sequence
  LRRK2 RNA guide
uucccugagcagcggacguuc

SEQ ID NO: 97235 - RNA, 21 nt, Artificial Sequence
  LRRK2 RNA guide
uuccucguccucuucgcaccc

SEQ ID NO: 97236 - RNA, 21 nt, Artificial Sequence
  LRRK2 RNA guide
uuccugaaauucucagcugcu

SEQ ID NO: 97237 - RNA, 21 nt, Artificial Sequence
  LRRK2 RNA guide
uuccuggacauuguucagccu

SEQ ID NO: 97238 - RNA, 21 nt, Artificial Sequence
  LRRK2 RNA guide
uuccuuagggcagaaagcagc

SEQ ID NO: 97239 - RNA, 21 nt, Artificial Sequence
  LRRK2 RNA guide
uuccuuccuggacauuguuca

SEQ ID NO: 97240 - RNA, 21 nt, Artificial Sequence
  LRRK2 RNA guide
uucgcaccccugacagcugcc

SEQ ID NO: 97241 - RNA, 21 nt, Artificial Sequence
  LRRK2 RNA guide
uucuaucuguuuuccuuccug

SEQ ID NO: 97242 - RNA, 21 nt, Artificial Sequence
  LRRK2 RNA guide
uucucagcugcuuucugcccu

SEQ ID NO: 97243 - RNA, 21 nt, Artificial Sequence
  LRRK2 RNA guide
uucucccccuccuuacauuug

SEQ ID NO: 97244 - RNA, 21 nt, Artificial Sequence
  LRRK2 RNA guide
uucugcccuaaggaaaggaua

SEQ ID NO: 97245 - RNA, 21 nt, Artificial Sequence
  LRRK2 RNA guide
uugacccugcucaaacccgga

SEQ ID NO: 97246 - RNA, 21 nt, Artificial Sequence
  LRRK2 RNA guide
uugacuuuucuccccguuuca

SEQ ID NO: 97247 - RNA, 21 nt, Artificial Sequence
  LRRK2 RNA guide
uugagcagggucaaggggagg

SEQ ID NO: 97248 - RNA, 21 nt, Artificial Sequence
  LRRK2 RNA guide
uugauagucaggcugaacaau

SEQ ID NO: 97249 - RNA, 21 nt, Artificial Sequence
  LRRK2 RNA guide
uugcaaacuuucucccccucc

SEQ ID NO: 97250 - RNA, 21 nt, Artificial Sequence
  LRRK2 RNA guide
uugcaaauguaaggaggggga

SEQ ID NO: 97251 - RNA, 21 nt, Artificial Sequence
  LRRK2 RNA guide
uugcaaauuuuguccuccucc

SEQ ID NO: 97252 - RNA, 21 nt, Artificial Sequence
  LRRK2 RNA guide
uugcggcuccuuaagaguccg

SEQ ID NO: 97253 - RNA, 21 nt, Artificial Sequence
  LRRK2 RNA guide
uuggaagcaggugccaccaug

SEQ ID NO: 97254 - RNA, 21 nt, Artificial Sequence
  LRRK2 RNA guide
uuggaccagcguuucuaucug

SEQ ID NO: 97255 - RNA, 21 nt, Artificial Sequence
  LRRK2 RNA guide
uuguccuccuccccuugaccc

SEQ ID NO: 97256 - RNA, 21 nt, Artificial Sequence
  LRRK2 RNA guide
uuguucagccugacuaucaac

SEQ ID NO: 97257 - RNA, 21 nt, Artificial Sequence
  LRRK2 RNA guide
uuuagucugaaacggggagaa

SEQ ID NO: 97258 - RNA, 21 nt, Artificial Sequence
  LRRK2 RNA guide
uuuauuuucaagugauuaccg

SEQ ID NO: 97259 - RNA, 21 nt, Artificial Sequence
  LRRK2 RNA guide
uuuauuuuugcaaacuuucuc

SEQ ID NO: 97260 - RNA, 21 nt, Artificial Sequence
  LRRK2 RNA guide
uuucaagugauuaccgcgcuc

SEQ ID NO: 97261 - RNA, 21 nt, Artificial Sequence
  LRRK2 RNA guide
uuucaggaaggucuucaccuu

SEQ ID NO: 97262 - RNA, 21 nt, Artificial Sequence
  LRRK2 RNA guide
uuuccucguccucuucgcacc

SEQ ID NO: 97263 - RNA, 21 nt, Artificial Sequence
  LRRK2 RNA guide
uuuccuuagggcagaaagcag

SEQ ID NO: 97264 - RNA, 21 nt, Artificial Sequence
  LRRK2 RNA guide
uuuccuuccuggacauuguuc

SEQ ID NO: 97265 - RNA, 21 nt, Artificial Sequence
  LRRK2 RNA guide
uuucuaucuguuuuccuuccu

SEQ ID NO: 97266 - RNA, 21 nt, Artificial Sequence
  LRRK2 RNA guide
uuucucccccuccuuacauuu

SEQ ID NO: 97267 - RNA, 21 nt, Artificial Sequence
  LRRK2 RNA guide
uuucugcccuaaggaaaggau

SEQ ID NO: 97268 - RNA, 21 nt, Artificial Sequence
  LRRK2 RNA guide
uuugacuuuucuccccguuuc

SEQ ID NO: 97269 - RNA, 21 nt, Artificial Sequence
  LRRK2 RNA guide
uuugagcagggucaaggggag

SEQ ID NO: 97270 - RNA, 21 nt, Artificial Sequence
  LRRK2 RNA guide
uuugcaaacuuucucccccuc

SEQ ID NO: 97271 - RNA, 21 nt, Artificial Sequence
  LRRK2 RNA guide
uuugcaaauguaaggaggggg

SEQ ID NO: 97272 - RNA, 21 nt, Artificial Sequence
  LRRK2 RNA guide
uuugcaaauuuuguccuccuc

SEQ ID NO: 97273 - RNA, 21 nt, Artificial Sequence
  LRRK2 RNA guide
uuugcggcuccuuaagagucc

SEQ ID NO: 97274 - RNA, 21 nt, Artificial Sequence
  LRRK2 RNA guide
uuuggaccagcguuucuaucu

SEQ ID NO: 97275 - RNA, 21 nt, Artificial Sequence
  LRRK2 RNA guide
uuuguccuccuccccuugacc

SEQ ID NO: 97276 - RNA, 21 nt, Artificial Sequence
  LRRK2 RNA guide
uuuuagucugaaacggggaga

SEQ ID NO: 97277 - RNA, 21 nt, Artificial Sequence
  LRRK2 RNA guide
uuuuauuuuugcaaacuuucu

SEQ ID NO: 97278 - RNA, 21 nt, Artificial Sequence
  LRRK2 RNA guide
uuuucaagugauuaccgcgcu

SEQ ID NO: 97279 - RNA, 21 nt, Artificial Sequence
  LRRK2 RNA guide
uuuuccuuccuggacauuguu

SEQ ID NO: 97280 - RNA, 21 nt, Artificial Sequence
  LRRK2 RNA guide
uuuucuccccguuucagacua

SEQ ID NO: 97281 - RNA, 21 nt, Artificial Sequence
  LRRK2 RNA guide
uuuugacuuuucuccccguuu

SEQ ID NO: 97282 - RNA, 21 nt, Artificial Sequence
  LRRK2 RNA guide
uuuugcaaacuuucucccccu

SEQ ID NO: 97283 - RNA, 21 nt, Artificial Sequence
  LRRK2 RNA guide
uuuuguccuccuccccuugac

SEQ ID NO: 97284 - RNA, 21 nt, Artificial Sequence
  LRRK2 RNA guide
uuuuuagucugaaacggggag

SEQ ID NO: 97285 - RNA, 21 nt, Artificial Sequence
  LRRK2 RNA guide
uuuuugacuuuucuccccguu

SEQ ID NO: 97286 - RNA, 21 nt, Artificial Sequence
  LRRK2 RNA guide
uuuuugcaaacuuucuccccc

SEQ ID NO: 97287 - RNA, 22 nt, Artificial Sequence
  LRRK2 RNA guide
aaaaaggugaagaccuuccuga

SEQ ID NO: 97288 - RNA, 22 nt, Artificial Sequence
  LRRK2 RNA guide
aaaacagauagaaacgcugguc

SEQ ID NO: 97289 - RNA, 22 nt, Artificial Sequence
  LRRK2 RNA guide
aaaaggugaagaccuuccugaa

SEQ ID NO: 97290 - RNA, 22 nt, Artificial Sequence
  LRRK2 RNA guide
aaaagucaaaaaggugaagacc

SEQ ID NO: 97291 - RNA, 22 nt, Artificial Sequence
  LRRK2 RNA guide
aaaauuugcaaauguaaggagg

SEQ ID NO: 97292 - RNA, 22 nt, Artificial Sequence
  LRRK2 RNA guide
aaacagauagaaacgcuggucc

SEQ ID NO: 97293 - RNA, 22 nt, Artificial Sequence
  LRRK2 RNA guide
aaacccggacucuuaaggagcc

SEQ ID NO: 97294 - RNA, 22 nt, Artificial Sequence
  LRRK2 RNA guide
aaacgcugguccaaauccugga

SEQ ID NO: 97295 - RNA, 22 nt, Artificial Sequence
  LRRK2 RNA guide
aaacggggagaaaagucaaaaa

SEQ ID NO: 97296 - RNA, 22 nt, Artificial Sequence
  LRRK2 RNA guide
aaacucccauauccuuuccuua

SEQ ID NO: 97297 - RNA, 22 nt, Artificial Sequence
  LRRK2 RNA guide
aaacucugaagaaguugauagu

SEQ ID NO: 97298 - RNA, 22 nt, Artificial Sequence
  LRRK2 RNA guide
aaacuuucucccccuccuuaca

SEQ ID NO: 97299 - RNA, 22 nt, Artificial Sequence
  LRRK2 RNA guide
aaagcagcugagaauuucagga

SEQ ID NO: 97300 - RNA, 22 nt, Artificial Sequence
  LRRK2 RNA guide
aaaggauaugggaguuugcggc

SEQ ID NO: 97301 - RNA, 22 nt, Artificial Sequence
  LRRK2 RNA guide
aaaggugaagaccuuccugaaa

SEQ ID NO: 97302 - RNA, 22 nt, Artificial Sequence
  LRRK2 RNA guide
aaagucaaaaaggugaagaccu

SEQ ID NO: 97303 - RNA, 22 nt, Artificial Sequence
  LRRK2 RNA guide
aaauccuggaggaucugcuggu

SEQ ID NO: 97304 - RNA, 22 nt, Artificial Sequence
  LRRK2 RNA guide
aaauguaaggagggggagaaag

SEQ ID NO: 97305 - RNA, 22 nt, Artificial Sequence
  LRRK2 RNA guide
aaauucucagcugcuuucugcc

SEQ ID NO: 97306 - RNA, 22 nt, Artificial Sequence
  LRRK2 RNA guide
aaauuugcaaauguaaggaggg

SEQ ID NO: 97307 - RNA, 22 nt, Artificial Sequence
  LRRK2 RNA guide
aaauuuuguccuccuccccuug

SEQ ID NO: 97308 - RNA, 22 nt, Artificial Sequence
  LRRK2 RNA guide
aacaauguccaggaaggaaaac

SEQ ID NO: 97309 - RNA, 22 nt, Artificial Sequence
  LRRK2 RNA guide
aacaccagcagauccuccagga

SEQ ID NO: 97310 - RNA, 22 nt, Artificial Sequence
  LRRK2 RNA guide
aacagauagaaacgcuggucca

SEQ ID NO: 97311 - RNA, 22 nt, Artificial Sequence
  LRRK2 RNA guide
aacccgccgcccucccagcaug

SEQ ID NO: 97312 - RNA, 22 nt, Artificial Sequence
  LRRK2 RNA guide
aacccggacucuuaaggagccg

SEQ ID NO: 97313 - RNA, 22 nt, Artificial Sequence
  LRRK2 RNA guide
aaccggcaggggcgccggccac

SEQ ID NO: 97314 - RNA, 22 nt, Artificial Sequence
  LRRK2 RNA guide
aacgcugguccaaauccuggag

SEQ ID NO: 97315 - RNA, 22 nt, Artificial Sequence
  LRRK2 RNA guide
aacggggagaaaagucaaaaag

SEQ ID NO: 97316 - RNA, 22 nt, Artificial Sequence
  LRRK2 RNA guide
aacguccgcugcucagggaacc

SEQ ID NO: 97317 - RNA, 22 nt, Artificial Sequence
  LRRK2 RNA guide
aacucccauauccuuuccuuag

SEQ ID NO: 97318 - RNA, 22 nt, Artificial Sequence
  LRRK2 RNA guide
aacucugaagaaguugauaguc

SEQ ID NO: 97319 - RNA, 22 nt, Artificial Sequence
  LRRK2 RNA guide
aacuucuucagaguuuccucgu

SEQ ID NO: 97320 - RNA, 22 nt, Artificial Sequence
  LRRK2 RNA guide
aacuuucucccccuccuuacau

SEQ ID NO: 97321 - RNA, 22 nt, Artificial Sequence
  LRRK2 RNA guide
aagaaguugauagucaggcuga

SEQ ID NO: 97322 - RNA, 22 nt, Artificial Sequence
  LRRK2 RNA guide
aagaccuuccugaaauucucag

SEQ ID NO: 97323 - RNA, 22 nt, Artificial Sequence
  LRRK2 RNA guide
aagaggacgaggaaacucugaa

SEQ ID NO: 97324 - RNA, 22 nt, Artificial Sequence
  LRRK2 RNA guide
aagaguccggguuugagcaggg

SEQ ID NO: 97325 - RNA, 22 nt, Artificial Sequence
  LRRK2 RNA guide
aagcagcugagaauuucaggaa

SEQ ID NO: 97326 - RNA, 22 nt, Artificial Sequence
  LRRK2 RNA guide
aagcaggugccaccauggcuag

SEQ ID NO: 97327 - RNA, 22 nt, Artificial Sequence
  LRRK2 RNA guide
aaggaaaacagauagaaacgcu

SEQ ID NO: 97328 - RNA, 22 nt, Artificial Sequence
  LRRK2 RNA guide
aaggaaaggauaugggaguuug

SEQ ID NO: 97329 - RNA, 22 nt, Artificial Sequence
  LRRK2 RNA guide
aaggagccgcaaacucccauau

SEQ ID NO: 97330 - RNA, 22 nt, Artificial Sequence
  LRRK2 RNA guide
aaggagggggagaaaguuugca

SEQ ID NO: 97331 - RNA, 22 nt, Artificial Sequence
  LRRK2 RNA guide
aaggauaugggaguuugcggcu

SEQ ID NO: 97332 - RNA, 22 nt, Artificial Sequence
  LRRK2 RNA guide
aaggggaggaggacaaaauuug

SEQ ID NO: 97333 - RNA, 22 nt, Artificial Sequence
  LRRK2 RNA guide
aaggucuucaccuuuuugacuu

SEQ ID NO: 97334 - RNA, 22 nt, Artificial Sequence
  LRRK2 RNA guide
aaggugaagaccuuccugaaau

SEQ ID NO: 97335 - RNA, 22 nt, Artificial Sequence
  LRRK2 RNA guide
aagucaaaaaggugaagaccuu

SEQ ID NO: 97336 - RNA, 22 nt, Artificial Sequence
  LRRK2 RNA guide
aagugauuaccgcgcucggagu

SEQ ID NO: 97337 - RNA, 22 nt, Artificial Sequence
  LRRK2 RNA guide
aaguugauagucaggcugaaca

SEQ ID NO: 97338 - RNA, 22 nt, Artificial Sequence
  LRRK2 RNA guide
aauccuggaggaucugcuggug

SEQ ID NO: 97339 - RNA, 22 nt, Artificial Sequence
  LRRK2 RNA guide
aauguaaggagggggagaaagu

SEQ ID NO: 97340 - RNA, 22 nt, Artificial Sequence
  LRRK2 RNA guide
aauguccaggaaggaaaacaga

SEQ ID NO: 97341 - RNA, 22 nt, Artificial Sequence
  LRRK2 RNA guide
aauucucagcugcuuucugccc

SEQ ID NO: 97342 - RNA, 22 nt, Artificial Sequence
  LRRK2 RNA guide
aauuucaggaaggucuucaccu

SEQ ID NO: 97343 - RNA, 22 nt, Artificial Sequence
  LRRK2 RNA guide
aauuugcaaauguaaggagggg

SEQ ID NO: 97344 - RNA, 22 nt, Artificial Sequence
  LRRK2 RNA guide
aauuuuguccuccuccccuuga

SEQ ID NO: 97345 - RNA, 22 nt, Artificial Sequence
  LRRK2 RNA guide
acaaaauuugcaaauguaagga

SEQ ID NO: 97346 - RNA, 22 nt, Artificial Sequence
  LRRK2 RNA guide
acaauguccaggaaggaaaaca

SEQ ID NO: 97347 - RNA, 22 nt, Artificial Sequence
  LRRK2 RNA guide
acaccagcagauccuccaggau

SEQ ID NO: 97348 - RNA, 22 nt, Artificial Sequence
  LRRK2 RNA guide
acagauagaaacgcugguccaa

SEQ ID NO: 97349 - RNA, 22 nt, Artificial Sequence
  LRRK2 RNA guide
acagcuccccgggggcgagcuc

SEQ ID NO: 97350 - RNA, 22 nt, Artificial Sequence
  LRRK2 RNA guide
acagcugccacuagccauggug

SEQ ID NO: 97351 - RNA, 22 nt, Artificial Sequence
  LRRK2 RNA guide
acaguuuauuuucaagugauua

SEQ ID NO: 97352 - RNA, 22 nt, Artificial Sequence
  LRRK2 RNA guide
acauuguucagccugacuauca

SEQ ID NO: 97353 - RNA, 22 nt, Artificial Sequence
  LRRK2 RNA guide
acauuugcaaauuuuguccucc

SEQ ID NO: 97354 - RNA, 22 nt, Artificial Sequence
  LRRK2 RNA guide
accagcagauccuccaggauuu

SEQ ID NO: 97355 - RNA, 22 nt, Artificial Sequence
  LRRK2 RNA guide
accagcguuucuaucuguuuuc

SEQ ID NO: 97356 - RNA, 22 nt, Artificial Sequence
  LRRK2 RNA guide
accauggcuaguggcagcuguc

SEQ ID NO: 97357 - RNA, 22 nt, Artificial Sequence
  LRRK2 RNA guide
accccugacagcugccacuagc

SEQ ID NO: 97358 - RNA, 22 nt, Artificial Sequence
  LRRK2 RNA guide
acccggacucuuaaggagccgc

SEQ ID NO: 97359 - RNA, 22 nt, Artificial Sequence
  LRRK2 RNA guide
acccugcucaaacccggacucu

SEQ ID NO: 97360 - RNA, 22 nt, Artificial Sequence
  LRRK2 RNA guide
accgcgcucggaguacgugaac

SEQ ID NO: 97361 - RNA, 22 nt, Artificial Sequence
  LRRK2 RNA guide
accugcuuccaacccgccgccc

SEQ ID NO: 97362 - RNA, 22 nt, Artificial Sequence
  LRRK2 RNA guide
accuuccugaaauucucagcug

SEQ ID NO: 97363 - RNA, 22 nt, Artificial Sequence
  LRRK2 RNA guide
accuuuuugacuuuucuccccg

SEQ ID NO: 97364 - RNA, 22 nt, Artificial Sequence
  LRRK2 RNA guide
acgaggaaacucugaagaaguu

SEQ ID NO: 97365 - RNA, 22 nt, Artificial Sequence
  LRRK2 RNA guide
acgcugguccaaauccuggagg

SEQ ID NO: 97366 - RNA, 22 nt, Artificial Sequence
  LRRK2 RNA guide
acggggagaaaagucaaaaagg

SEQ ID NO: 97367 - RNA, 22 nt, Artificial Sequence
  LRRK2 RNA guide
acguacuccgagcgcgguaauc

SEQ ID NO: 97368 - RNA, 22 nt, Artificial Sequence
  LRRK2 RNA guide
acguccgcugcucagggaaccg

SEQ ID NO: 97369 - RNA, 22 nt, Artificial Sequence
  LRRK2 RNA guide
acgugaacaccagcagauccuc

SEQ ID NO: 97370 - RNA, 22 nt, Artificial Sequence
  LRRK2 RNA guide
acguucaugcugggagggcggc

SEQ ID NO: 97371 - RNA, 22 nt, Artificial Sequence
  LRRK2 RNA guide
acuagccaugguggcaccugcu

SEQ ID NO: 97372 - RNA, 22 nt, Artificial Sequence
  LRRK2 RNA guide
acuaucaacuucuucagaguuu

SEQ ID NO: 97373 - RNA, 22 nt, Artificial Sequence
  LRRK2 RNA guide
acucccauauccuuuccuuagg

SEQ ID NO: 97374 - RNA, 22 nt, Artificial Sequence
  LRRK2 RNA guide
acuccgagcgcgguaaucacuu

SEQ ID NO: 97375 - RNA, 22 nt, Artificial Sequence
  LRRK2 RNA guide
acucugaagaaguugauaguca

SEQ ID NO: 97376 - RNA, 22 nt, Artificial Sequence
  LRRK2 RNA guide
acucuuaaggagccgcaaacuc

SEQ ID NO: 97377 - RNA, 22 nt, Artificial Sequence
  LRRK2 RNA guide
acuucuucagaguuuccucguc

SEQ ID NO: 97378 - RNA, 22 nt, Artificial Sequence
  LRRK2 RNA guide
acuuucucccccuccuuacauu

SEQ ID NO: 97379 - RNA, 22 nt, Artificial Sequence
  LRRK2 RNA guide
acuuuucuccccguuucagacu

SEQ ID NO: 97380 - RNA, 22 nt, Artificial Sequence
  LRRK2 RNA guide
agaaaagucaaaaaggugaaga

SEQ ID NO: 97381 - RNA, 22 nt, Artificial Sequence
  LRRK2 RNA guide
agaaacgcugguccaaauccug

SEQ ID NO: 97382 - RNA, 22 nt, Artificial Sequence
  LRRK2 RNA guide
agaaagcagcugagaauuucag

SEQ ID NO: 97383 - RNA, 22 nt, Artificial Sequence
  LRRK2 RNA guide
agaaguugauagucaggcugaa

SEQ ID NO: 97384 - RNA, 22 nt, Artificial Sequence
  LRRK2 RNA guide
agaauuucaggaaggucuucac

SEQ ID NO: 97385 - RNA, 22 nt, Artificial Sequence
  LRRK2 RNA guide
agaccuuccugaaauucucagc

SEQ ID NO: 97386 - RNA, 22 nt, Artificial Sequence
  LRRK2 RNA guide
agaggacgaggaaacucugaag

SEQ ID NO: 97387 - RNA, 22 nt, Artificial Sequence
  LRRK2 RNA guide
agaguccggguuugagcagggu

SEQ ID NO: 97388 - RNA, 22 nt, Artificial Sequence
  LRRK2 RNA guide
agaguuuccucguccucuucgc

SEQ ID NO: 97389 - RNA, 22 nt, Artificial Sequence
  LRRK2 RNA guide
agauagaaacgcugguccaaau

SEQ ID NO: 97390 - RNA, 22 nt, Artificial Sequence
  LRRK2 RNA guide
agcacaguuuauuuucaaguga

SEQ ID NO: 97391 - RNA, 22 nt, Artificial Sequence
  LRRK2 RNA guide
agcagcggacguucaugcuggg

SEQ ID NO: 97392 - RNA, 22 nt, Artificial Sequence
  LRRK2 RNA guide
agcagcugagaauuucaggaag

SEQ ID NO: 97393 - RNA, 22 nt, Artificial Sequence
  LRRK2 RNA guide
agcagggucaaggggaggagga

SEQ ID NO: 97394 - RNA, 22 nt, Artificial Sequence
  LRRK2 RNA guide
agcaggugccaccauggcuagu

SEQ ID NO: 97395 - RNA, 22 nt, Artificial Sequence
  LRRK2 RNA guide
agcaugaacguccgcugcucag

SEQ ID NO: 97396 - RNA, 22 nt, Artificial Sequence
  LRRK2 RNA guide
agccaugguggcaccugcuucc

SEQ ID NO: 97397 - RNA, 22 nt, Artificial Sequence
  LRRK2 RNA guide
agccgcaaacucccauauccuu

SEQ ID NO: 97398 - RNA, 22 nt, Artificial Sequence
  LRRK2 RNA guide
agccugacuaucaacuucuuca

SEQ ID NO: 97399 - RNA, 22 nt, Artificial Sequence
  LRRK2 RNA guide
agcgcgguaaucacuugaaaau

SEQ ID NO: 97400 - RNA, 22 nt, Artificial Sequence
  LRRK2 RNA guide
agcgcuggcugcgggcggugag

SEQ ID NO: 97401 - RNA, 22 nt, Artificial Sequence
  LRRK2 RNA guide
agcggacguucaugcugggagg

SEQ ID NO: 97402 - RNA, 22 nt, Artificial Sequence
  LRRK2 RNA guide
agcguuucuaucuguuuuccuu

SEQ ID NO: 97403 - RNA, 22 nt, Artificial Sequence
  LRRK2 RNA guide
agcucaccgcccgcagccagcg

SEQ ID NO: 97404 - RNA, 22 nt, Artificial Sequence
  LRRK2 RNA guide
agcucagcucaccgcccgcagc

SEQ ID NO: 97405 - RNA, 22 nt, Artificial Sequence
  LRRK2 RNA guide
agcuccccgggggcgagcucag

SEQ ID NO: 97406 - RNA, 22 nt, Artificial Sequence
  LRRK2 RNA guide
agcugagaauuucaggaagguc

SEQ ID NO: 97407 - RNA, 22 nt, Artificial Sequence
  LRRK2 RNA guide
agcugagcucgcccccggggag

SEQ ID NO: 97408 - RNA, 22 nt, Artificial Sequence
  LRRK2 RNA guide
agcugccacuagccaugguggc

SEQ ID NO: 97409 - RNA, 22 nt, Artificial Sequence
  LRRK2 RNA guide
agcugcuuucugcccuaaggaa

SEQ ID NO: 97410 - RNA, 22 nt, Artificial Sequence
  LRRK2 RNA guide
agcugucaggggugcgaagagg

SEQ ID NO: 97411 - RNA, 22 nt, Artificial Sequence
  LRRK2 RNA guide
agcuguggccggcgccccugcc

SEQ ID NO: 97412 - RNA, 22 nt, Artificial Sequence
  LRRK2 RNA guide
aggaaaacagauagaaacgcug

SEQ ID NO: 97413 - RNA, 22 nt, Artificial Sequence
  LRRK2 RNA guide
aggaaacucugaagaaguugau

SEQ ID NO: 97414 - RNA, 22 nt, Artificial Sequence
  LRRK2 RNA guide
aggaaaggauaugggaguuugc

SEQ ID NO: 97415 - RNA, 22 nt, Artificial Sequence
  LRRK2 RNA guide
aggaaggucuucaccuuuuuga

SEQ ID NO: 97416 - RNA, 22 nt, Artificial Sequence
  LRRK2 RNA guide
aggacaaaauuugcaaauguaa

SEQ ID NO: 97417 - RNA, 22 nt, Artificial Sequence
  LRRK2 RNA guide
aggacgaggaaacucugaagaa

SEQ ID NO: 97418 - RNA, 22 nt, Artificial Sequence
  LRRK2 RNA guide
aggagccgcaaacucccauauc

SEQ ID NO: 97419 - RNA, 22 nt, Artificial Sequence
  LRRK2 RNA guide
aggaggacaaaauuugcaaaug

SEQ ID NO: 97420 - RNA, 22 nt, Artificial Sequence
  LRRK2 RNA guide
aggagggggagaaaguuugcaa

SEQ ID NO: 97421 - RNA, 22 nt, Artificial Sequence
  LRRK2 RNA guide
aggauaugggaguuugcggcuc

SEQ ID NO: 97422 - RNA, 22 nt, Artificial Sequence
  LRRK2 RNA guide
aggaucugcugguguucacgua

SEQ ID NO: 97423 - RNA, 22 nt, Artificial Sequence
  LRRK2 RNA guide
aggauuuggaccagcguuucua

SEQ ID NO: 97424 - RNA, 22 nt, Artificial Sequence
  LRRK2 RNA guide
aggcugaacaauguccaggaag

SEQ ID NO: 97425 - RNA, 22 nt, Artificial Sequence
  LRRK2 RNA guide
agggaaccggcaggggcgccgg

SEQ ID NO: 97426 - RNA, 22 nt, Artificial Sequence
  LRRK2 RNA guide
agggcagaaagcagcugagaau

SEQ ID NO: 97427 - RNA, 22 nt, Artificial Sequence
  LRRK2 RNA guide
agggcggcggguuggaagcagg

SEQ ID NO: 97428 - RNA, 22 nt, Artificial Sequence
  LRRK2 RNA guide
aggggaggaggacaaaauuugc

SEQ ID NO: 97429 - RNA, 22 nt, Artificial Sequence
  LRRK2 RNA guide
agggggagaaaguuugcaaaaa

SEQ ID NO: 97430 - RNA, 22 nt, Artificial Sequence
  LRRK2 RNA guide
aggggugcgaagaggacgagga

SEQ ID NO: 97431 - RNA, 22 nt, Artificial Sequence
  LRRK2 RNA guide
agggucaaggggaggaggacaa

SEQ ID NO: 97432 - RNA, 22 nt, Artificial Sequence
  LRRK2 RNA guide
aggucuucaccuuuuugacuuu

SEQ ID NO: 97433 - RNA, 22 nt, Artificial Sequence
  LRRK2 RNA guide
aggugaagaccuuccugaaauu

SEQ ID NO: 97434 - RNA, 22 nt, Artificial Sequence
  LRRK2 RNA guide
aggugccaccauggcuaguggc

SEQ ID NO: 97435 - RNA, 22 nt, Artificial Sequence
  LRRK2 RNA guide
aguacgugaacaccagcagauc

SEQ ID NO: 97436 - RNA, 22 nt, Artificial Sequence
  LRRK2 RNA guide
agucaaaaaggugaagaccuuc

SEQ ID NO: 97437 - RNA, 22 nt, Artificial Sequence
  LRRK2 RNA guide
agucaggcugaacaauguccag

SEQ ID NO: 97438 - RNA, 22 nt, Artificial Sequence
  LRRK2 RNA guide
aguccggguuugagcaggguca

SEQ ID NO: 97439 - RNA, 22 nt, Artificial Sequence
  LRRK2 RNA guide
agucugaaacggggagaaaagu

SEQ ID NO: 97440 - RNA, 22 nt, Artificial Sequence
  LRRK2 RNA guide
agugauuaccgcgcucggagua

SEQ ID NO: 97441 - RNA, 22 nt, Artificial Sequence
  LRRK2 RNA guide
aguggcagcugucaggggugcg

SEQ ID NO: 97442 - RNA, 22 nt, Artificial Sequence
  LRRK2 RNA guide
aguugauagucaggcugaacaa

SEQ ID NO: 97443 - RNA, 22 nt, Artificial Sequence
  LRRK2 RNA guide
aguuuauuuucaagugauuacc

SEQ ID NO: 97444 - RNA, 22 nt, Artificial Sequence
  LRRK2 RNA guide
aguuuccucguccucuucgcac

SEQ ID NO: 97445 - RNA, 22 nt, Artificial Sequence
  LRRK2 RNA guide
aguuugcggcuccuuaagaguc

SEQ ID NO: 97446 - RNA, 22 nt, Artificial Sequence
  LRRK2 RNA guide
auagaaacgcugguccaaaucc

SEQ ID NO: 97447 - RNA, 22 nt, Artificial Sequence
  LRRK2 RNA guide
auagucaggcugaacaaugucc

SEQ ID NO: 97448 - RNA, 22 nt, Artificial Sequence
  LRRK2 RNA guide
auauccuuuccuuagggcagaa

SEQ ID NO: 97449 - RNA, 22 nt, Artificial Sequence
  LRRK2 RNA guide
auaugggaguuugcggcuccuu

SEQ ID NO: 97450 - RNA, 22 nt, Artificial Sequence
  LRRK2 RNA guide
aucaacuucuucagaguuuccu

SEQ ID NO: 97451 - RNA, 22 nt, Artificial Sequence
  LRRK2 RNA guide
auccuccaggauuuggaccagc

SEQ ID NO: 97452 - RNA, 22 nt, Artificial Sequence
  LRRK2 RNA guide
auccuggaggaucugcuggugu

SEQ ID NO: 97453 - RNA, 22 nt, Artificial Sequence
  LRRK2 RNA guide
auccuuuccuuagggcagaaag

SEQ ID NO: 97454 - RNA, 22 nt, Artificial Sequence
  LRRK2 RNA guide
aucugcugguguucacguacuc

SEQ ID NO: 97455 - RNA, 22 nt, Artificial Sequence
  LRRK2 RNA guide
aucuguuuuccuuccuggacau

SEQ ID NO: 97456 - RNA, 22 nt, Artificial Sequence
  LRRK2 RNA guide
augaacguccgcugcucaggga

SEQ ID NO: 97457 - RNA, 22 nt, Artificial Sequence
  LRRK2 RNA guide
augcugggagggcggcggguug

SEQ ID NO: 97458 - RNA, 22 nt, Artificial Sequence
  LRRK2 RNA guide
auggcuaguggcagcugucagg

SEQ ID NO: 97459 - RNA, 22 nt, Artificial Sequence
  LRRK2 RNA guide
augggaguuugcggcuccuuaa

SEQ ID NO: 97460 - RNA, 22 nt, Artificial Sequence
  LRRK2 RNA guide
augguggcaccugcuuccaacc

SEQ ID NO: 97461 - RNA, 22 nt, Artificial Sequence
  LRRK2 RNA guide
auguaaggagggggagaaaguu

SEQ ID NO: 97462 - RNA, 22 nt, Artificial Sequence
  LRRK2 RNA guide
auguccaggaaggaaaacagau

SEQ ID NO: 97463 - RNA, 22 nt, Artificial Sequence
  LRRK2 RNA guide
auuaccgcgcucggaguacgug

SEQ ID NO: 97464 - RNA, 22 nt, Artificial Sequence
  LRRK2 RNA guide
auucucagcugcuuucugcccu

SEQ ID NO: 97465 - RNA, 22 nt, Artificial Sequence
  LRRK2 RNA guide
auuguucagccugacuaucaac

SEQ ID NO: 97466 - RNA, 22 nt, Artificial Sequence
  LRRK2 RNA guide
auuucaggaaggucuucaccuu

SEQ ID NO: 97467 - RNA, 22 nt, Artificial Sequence
  LRRK2 RNA guide
auuugcaaauguaaggaggggg

SEQ ID NO: 97468 - RNA, 22 nt, Artificial Sequence
  LRRK2 RNA guide
auuugcaaauuuuguccuccuc

SEQ ID NO: 97469 - RNA, 22 nt, Artificial Sequence
  LRRK2 RNA guide
auuuggaccagcguuucuaucu

SEQ ID NO: 97470 - RNA, 22 nt, Artificial Sequence
  LRRK2 RNA guide
auuuucaagugauuaccgcgcu

SEQ ID NO: 97471 - RNA, 22 nt, Artificial Sequence
  LRRK2 RNA guide
auuuuguccuccuccccuugac

SEQ ID NO: 97472 - RNA, 22 nt, Artificial Sequence
  LRRK2 RNA guide
auuuuugcaaacuuucuccccc

SEQ ID NO: 97473 - RNA, 22 nt, Artificial Sequence
  LRRK2 RNA guide
caaaaaggugaagaccuuccug

SEQ ID NO: 97474 - RNA, 22 nt, Artificial Sequence
  LRRK2 RNA guide
caaaauuugcaaauguaaggag

SEQ ID NO: 97475 - RNA, 22 nt, Artificial Sequence
  LRRK2 RNA guide
caaacccggacucuuaaggagc

SEQ ID NO: 97476 - RNA, 22 nt, Artificial Sequence
  LRRK2 RNA guide
caaacucccauauccuuuccuu

SEQ ID NO: 97477 - RNA, 22 nt, Artificial Sequence
  LRRK2 RNA guide
caaacuuucucccccuccuuac

SEQ ID NO: 97478 - RNA, 22 nt, Artificial Sequence
  LRRK2 RNA guide
caaauccuggaggaucugcugg

SEQ ID NO: 97479 - RNA, 22 nt, Artificial Sequence
  LRRK2 RNA guide
caaauguaaggagggggagaaa

SEQ ID NO: 97480 - RNA, 22 nt, Artificial Sequence
  LRRK2 RNA guide
caaauuuuguccuccuccccuu

SEQ ID NO: 97481 - RNA, 22 nt, Artificial Sequence
  LRRK2 RNA guide
caacccgccgcccucccagcau

SEQ ID NO: 97482 - RNA, 22 nt, Artificial Sequence
  LRRK2 RNA guide
caacuucuucagaguuuccucg

SEQ ID NO: 97483 - RNA, 22 nt, Artificial Sequence
  LRRK2 RNA guide
caaggggaggaggacaaaauuu

SEQ ID NO: 97484 - RNA, 22 nt, Artificial Sequence
  LRRK2 RNA guide
caagugauuaccgcgcucggag

SEQ ID NO: 97485 - RNA, 22 nt, Artificial Sequence
  LRRK2 RNA guide
caauguccaggaaggaaaacag

SEQ ID NO: 97486 - RNA, 22 nt, Artificial Sequence
  LRRK2 RNA guide
cacagcuccccgggggcgagcu

SEQ ID NO: 97487 - RNA, 22 nt, Artificial Sequence
  LRRK2 RNA guide
cacaguuuauuuucaagugauu

SEQ ID NO: 97488 - RNA, 22 nt, Artificial Sequence
  LRRK2 RNA guide
caccagcagauccuccaggauu

SEQ ID NO: 97489 - RNA, 22 nt, Artificial Sequence
  LRRK2 RNA guide
caccauggcuaguggcagcugu

SEQ ID NO: 97490 - RNA, 22 nt, Artificial Sequence
  LRRK2 RNA guide
caccccugacagcugccacuag

SEQ ID NO: 97491 - RNA, 22 nt, Artificial Sequence
  LRRK2 RNA guide
caccugcuuccaacccgccgcc

SEQ ID NO: 97492 - RNA, 22 nt, Artificial Sequence
  LRRK2 RNA guide
caccuuuuugacuuuucucccc

SEQ ID NO: 97493 - RNA, 22 nt, Artificial Sequence
  LRRK2 RNA guide
cacguacuccgagcgcgguaau

SEQ ID NO: 97494 - RNA, 22 nt, Artificial Sequence
  LRRK2 RNA guide
cacuagccaugguggcaccugc

SEQ ID NO: 97495 - RNA, 22 nt, Artificial Sequence
  LRRK2 RNA guide
cagaaagcagcugagaauuuca

SEQ ID NO: 97496 - RNA, 22 nt, Artificial Sequence
  LRRK2 RNA guide
cagaguuuccucguccucuucg

SEQ ID NO: 97497 - RNA, 22 nt, Artificial Sequence
  LRRK2 RNA guide
cagauagaaacgcugguccaaa

SEQ ID NO: 97498 - RNA, 22 nt, Artificial Sequence
  LRRK2 RNA guide
cagcagauccuccaggauuugg

SEQ ID NO: 97499 - RNA, 22 nt, Artificial Sequence
  LRRK2 RNA guide
cagcaugaacguccgcugcuca

SEQ ID NO: 97500 - RNA, 22 nt, Artificial Sequence
  LRRK2 RNA guide
cagccugacuaucaacuucuuc

SEQ ID NO: 97501 - RNA, 22 nt, Artificial Sequence
  LRRK2 RNA guide
cagcggacguucaugcugggag

SEQ ID NO: 97502 - RNA, 22 nt, Artificial Sequence
  LRRK2 RNA guide
cagcguuucuaucuguuuuccu

SEQ ID NO: 97503 - RNA, 22 nt, Artificial Sequence
  LRRK2 RNA guide
cagcucaccgcccgcagccagc

SEQ ID NO: 97504 - RNA, 22 nt, Artificial Sequence
  LRRK2 RNA guide
cagcuccccgggggcgagcuca

SEQ ID NO: 97505 - RNA, 22 nt, Artificial Sequence
  LRRK2 RNA guide
cagcugagaauuucaggaaggu

SEQ ID NO: 97506 - RNA, 22 nt, Artificial Sequence
  LRRK2 RNA guide
cagcugccacuagccauggugg

SEQ ID NO: 97507 - RNA, 22 nt, Artificial Sequence
  LRRK2 RNA guide
cagcugcuuucugcccuaagga

SEQ ID NO: 97508 - RNA, 22 nt, Artificial Sequence
  LRRK2 RNA guide
cagcugucaggggugcgaagag

SEQ ID NO: 97509 - RNA, 22 nt, Artificial Sequence
  LRRK2 RNA guide
caggaaggucuucaccuuuuug

SEQ ID NO: 97510 - RNA, 22 nt, Artificial Sequence
  LRRK2 RNA guide
caggauuuggaccagcguuucu

SEQ ID NO: 97511 - RNA, 22 nt, Artificial Sequence
  LRRK2 RNA guide
caggcugaacaauguccaggaa

SEQ ID NO: 97512 - RNA, 22 nt, Artificial Sequence
  LRRK2 RNA guide
caggggugcgaagaggacgagg

SEQ ID NO: 97513 - RNA, 22 nt, Artificial Sequence
  LRRK2 RNA guide
cagggucaaggggaggaggaca

SEQ ID NO: 97514 - RNA, 22 nt, Artificial Sequence
  LRRK2 RNA guide
caggugccaccauggcuagugg

SEQ ID NO: 97515 - RNA, 22 nt, Artificial Sequence
  LRRK2 RNA guide
caguuuauuuucaagugauuac

SEQ ID NO: 97516 - RNA, 22 nt, Artificial Sequence
  LRRK2 RNA guide
cauauccuuuccuuagggcaga

SEQ ID NO: 97517 - RNA, 22 nt, Artificial Sequence
  LRRK2 RNA guide
caugaacguccgcugcucaggg

SEQ ID NO: 97518 - RNA, 22 nt, Artificial Sequence
  LRRK2 RNA guide
caugcugggagggcggcggguu

SEQ ID NO: 97519 - RNA, 22 nt, Artificial Sequence
  LRRK2 RNA guide
cauggcuaguggcagcugucag

SEQ ID NO: 97520 - RNA, 22 nt, Artificial Sequence
  LRRK2 RNA guide
caugguggcaccugcuuccaac

SEQ ID NO: 97521 - RNA, 22 nt, Artificial Sequence
  LRRK2 RNA guide
cauuguucagccugacuaucaa

SEQ ID NO: 97522 - RNA, 22 nt, Artificial Sequence
  LRRK2 RNA guide
cauuugcaaauuuuguccuccu

SEQ ID NO: 97523 - RNA, 22 nt, Artificial Sequence
  LRRK2 RNA guide
ccaaauccuggaggaucugcug

SEQ ID NO: 97524 - RNA, 22 nt, Artificial Sequence
  LRRK2 RNA guide
ccaacccgccgcccucccagca

SEQ ID NO: 97525 - RNA, 22 nt, Artificial Sequence
  LRRK2 RNA guide
ccacagcuccccgggggcgagc

SEQ ID NO: 97526 - RNA, 22 nt, Artificial Sequence
  LRRK2 RNA guide
ccaccauggcuaguggcagcug

SEQ ID NO: 97527 - RNA, 22 nt, Artificial Sequence
  LRRK2 RNA guide
ccacuagccaugguggcaccug

SEQ ID NO: 97528 - RNA, 22 nt, Artificial Sequence
  LRRK2 RNA guide
ccagcagauccuccaggauuug

SEQ ID NO: 97529 - RNA, 22 nt, Artificial Sequence
  LRRK2 RNA guide
ccagcaugaacguccgcugcuc

SEQ ID NO: 97530 - RNA, 22 nt, Artificial Sequence
  LRRK2 RNA guide
ccagcguuucuaucuguuuucc

SEQ ID NO: 97531 - RNA, 22 nt, Artificial Sequence
  LRRK2 RNA guide
ccaggauuuggaccagcguuuc

SEQ ID NO: 97532 - RNA, 22 nt, Artificial Sequence
  LRRK2 RNA guide
ccauauccuuuccuuagggcag

SEQ ID NO: 97533 - RNA, 22 nt, Artificial Sequence
  LRRK2 RNA guide
ccauggcuaguggcagcuguca

SEQ ID NO: 97534 - RNA, 22 nt, Artificial Sequence
  LRRK2 RNA guide
ccaugguggcaccugcuuccaa

SEQ ID NO: 97535 - RNA, 22 nt, Artificial Sequence
  LRRK2 RNA guide
cccagcaugaacguccgcugcu

SEQ ID NO: 97536 - RNA, 22 nt, Artificial Sequence
  LRRK2 RNA guide
cccauauccuuuccuuagggca

SEQ ID NO: 97537 - RNA, 22 nt, Artificial Sequence
  LRRK2 RNA guide
cccccuccuuacauuugcaaau

SEQ ID NO: 97538 - RNA, 22 nt, Artificial Sequence
  LRRK2 RNA guide
ccccuccuuacauuugcaaauu

SEQ ID NO: 97539 - RNA, 22 nt, Artificial Sequence
  LRRK2 RNA guide
ccccugacagcugccacuagcc

SEQ ID NO: 97540 - RNA, 22 nt, Artificial Sequence
  LRRK2 RNA guide
ccccuugacccugcucaaaccc

SEQ ID NO: 97541 - RNA, 22 nt, Artificial Sequence
  LRRK2 RNA guide
cccggacucuuaaggagccgca

SEQ ID NO: 97542 - RNA, 22 nt, Artificial Sequence
  LRRK2 RNA guide
cccuaaggaaaggauaugggag

SEQ ID NO: 97543 - RNA, 22 nt, Artificial Sequence
  LRRK2 RNA guide
cccucccagcaugaacguccgc

SEQ ID NO: 97544 - RNA, 22 nt, Artificial Sequence
  LRRK2 RNA guide
cccuccuuacauuugcaaauuu

SEQ ID NO: 97545 - RNA, 22 nt, Artificial Sequence
  LRRK2 RNA guide
cccugacagcugccacuagcca

SEQ ID NO: 97546 - RNA, 22 nt, Artificial Sequence
  LRRK2 RNA guide
cccugagcagcggacguucaug

SEQ ID NO: 97547 - RNA, 22 nt, Artificial Sequence
  LRRK2 RNA guide
cccugcucaaacccggacucuu

SEQ ID NO: 97548 - RNA, 22 nt, Artificial Sequence
  LRRK2 RNA guide
cccuugacccugcucaaacccg

SEQ ID NO: 97549 - RNA, 22 nt, Artificial Sequence
  LRRK2 RNA guide
ccgagcgcgguaaucacuugaa

SEQ ID NO: 97550 - RNA, 22 nt, Artificial Sequence
  LRRK2 RNA guide
ccgcaaacucccauauccuuuc

SEQ ID NO: 97551 - RNA, 22 nt, Artificial Sequence
  LRRK2 RNA guide
ccgcccucccagcaugaacguc

SEQ ID NO: 97552 - RNA, 22 nt, Artificial Sequence
  LRRK2 RNA guide
ccgcgcucggaguacgugaaca

SEQ ID NO: 97553 - RNA, 22 nt, Artificial Sequence
  LRRK2 RNA guide
ccgcugcucagggaaccggcag

SEQ ID NO: 97554 - RNA, 22 nt, Artificial Sequence
  LRRK2 RNA guide
ccggacucuuaaggagccgcaa

SEQ ID NO: 97555 - RNA, 22 nt, Artificial Sequence
  LRRK2 RNA guide
ccggcgccccugccgguucccu

SEQ ID NO: 97556 - RNA, 22 nt, Artificial Sequence
  LRRK2 RNA guide
ccggguuugagcagggucaagg

SEQ ID NO: 97557 - RNA, 22 nt, Artificial Sequence
  LRRK2 RNA guide
ccgguucccugagcagcggacg

SEQ ID NO: 97558 - RNA, 22 nt, Artificial Sequence
  LRRK2 RNA guide
ccuaaggaaaggauaugggagu

SEQ ID NO: 97559 - RNA, 22 nt, Artificial Sequence
  LRRK2 RNA guide
ccuccaggauuuggaccagcgu

SEQ ID NO: 97560 - RNA, 22 nt, Artificial Sequence
  LRRK2 RNA guide
ccucccagcaugaacguccgcu

SEQ ID NO: 97561 - RNA, 22 nt, Artificial Sequence
  LRRK2 RNA guide
ccuccccuugacccugcucaaa

SEQ ID NO: 97562 - RNA, 22 nt, Artificial Sequence
  LRRK2 RNA guide
ccuccuccccuugacccugcuc

SEQ ID NO: 97563 - RNA, 22 nt, Artificial Sequence
  LRRK2 RNA guide
ccuccuuacauuugcaaauuuu

SEQ ID NO: 97564 - RNA, 22 nt, Artificial Sequence
  LRRK2 RNA guide
ccucguccucuucgcaccccug

SEQ ID NO: 97565 - RNA, 22 nt, Artificial Sequence
  LRRK2 RNA guide
ccucuucgcaccccugacagcu

SEQ ID NO: 97566 - RNA, 22 nt, Artificial Sequence
  LRRK2 RNA guide
ccugaaauucucagcugcuuuc

SEQ ID NO: 97567 - RNA, 22 nt, Artificial Sequence
  LRRK2 RNA guide
ccugacagcugccacuagccau

SEQ ID NO: 97568 - RNA, 22 nt, Artificial Sequence
  LRRK2 RNA guide
ccugacuaucaacuucuucaga

SEQ ID NO: 97569 - RNA, 22 nt, Artificial Sequence
  LRRK2 RNA guide
ccugagcagcggacguucaugc

SEQ ID NO: 97570 - RNA, 22 nt, Artificial Sequence
  LRRK2 RNA guide
ccugcucaaacccggacucuua

SEQ ID NO: 97571 - RNA, 22 nt, Artificial Sequence
  LRRK2 RNA guide
ccugcuuccaacccgccgcccu

SEQ ID NO: 97572 - RNA, 22 nt, Artificial Sequence
  LRRK2 RNA guide
ccuggacauuguucagccugac

SEQ ID NO: 97573 - RNA, 22 nt, Artificial Sequence
  LRRK2 RNA guide
ccuggaggaucugcugguguuc

SEQ ID NO: 97574 - RNA, 22 nt, Artificial Sequence
  LRRK2 RNA guide
ccuuaagaguccggguuugagc

SEQ ID NO: 97575 - RNA, 22 nt, Artificial Sequence
  LRRK2 RNA guide
ccuuacauuugcaaauuuuguc

SEQ ID NO: 97576 - RNA, 22 nt, Artificial Sequence
  LRRK2 RNA guide
ccuuagggcagaaagcagcuga

SEQ ID NO: 97577 - RNA, 22 nt, Artificial Sequence
  LRRK2 RNA guide
ccuuccugaaauucucagcugc

SEQ ID NO: 97578 - RNA, 22 nt, Artificial Sequence
  LRRK2 RNA guide
ccuuccuggacauuguucagcc

SEQ ID NO: 97579 - RNA, 22 nt, Artificial Sequence
  LRRK2 RNA guide
ccuugacccugcucaaacccgg

SEQ ID NO: 97580 - RNA, 22 nt, Artificial Sequence
  LRRK2 RNA guide
ccuuuccuuagggcagaaagca

SEQ ID NO: 97581 - RNA, 22 nt, Artificial Sequence
  LRRK2 RNA guide
ccuuuuugacuuuucuccccgu

SEQ ID NO: 97582 - RNA, 22 nt, Artificial Sequence
  LRRK2 RNA guide
cgaagaggacgaggaaacucug

SEQ ID NO: 97583 - RNA, 22 nt, Artificial Sequence
  LRRK2 RNA guide
cgagcgcgguaaucacuugaaa

SEQ ID NO: 97584 - RNA, 22 nt, Artificial Sequence
  LRRK2 RNA guide
cgagcucagcucaccgcccgca

SEQ ID NO: 97585 - RNA, 22 nt, Artificial Sequence
  LRRK2 RNA guide
cgaggaaacucugaagaaguug

SEQ ID NO: 97586 - RNA, 22 nt, Artificial Sequence
  LRRK2 RNA guide
cgcaaacucccauauccuuucc

SEQ ID NO: 97587 - RNA, 22 nt, Artificial Sequence
  LRRK2 RNA guide
cgcaccccugacagcugccacu

SEQ ID NO: 97588 - RNA, 22 nt, Artificial Sequence
  LRRK2 RNA guide
cgcccucccagcaugaacgucc

SEQ ID NO: 97589 - RNA, 22 nt, Artificial Sequence
  LRRK2 RNA guide
cgcgcucggaguacgugaacac

SEQ ID NO: 97590 - RNA, 22 nt, Artificial Sequence
  LRRK2 RNA guide
cgcgguaaucacuugaaaauaa

SEQ ID NO: 97591 - RNA, 22 nt, Artificial Sequence
  LRRK2 RNA guide
cgcucggaguacgugaacacca

SEQ ID NO: 97592 - RNA, 22 nt, Artificial Sequence
  LRRK2 RNA guide
cgcugcucagggaaccggcagg

SEQ ID NO: 97593 - RNA, 22 nt, Artificial Sequence
  LRRK2 RNA guide
cgcuggcugcgggcggugagcu

SEQ ID NO: 97594 - RNA, 22 nt, Artificial Sequence
  LRRK2 RNA guide
cgcugguccaaauccuggagga

SEQ ID NO: 97595 - RNA, 22 nt, Artificial Sequence
  LRRK2 RNA guide
cggacguucaugcugggagggc

SEQ ID NO: 97596 - RNA, 22 nt, Artificial Sequence
  LRRK2 RNA guide
cggacucuuaaggagccgcaaa

SEQ ID NO: 97597 - RNA, 22 nt, Artificial Sequence
  LRRK2 RNA guide
cggaguacgugaacaccagcag

SEQ ID NO: 97598 - RNA, 22 nt, Artificial Sequence
  LRRK2 RNA guide
cggcgccccugccgguucccug

SEQ ID NO: 97599 - RNA, 22 nt, Artificial Sequence
  LRRK2 RNA guide
cggcggguuggaagcaggugcc

SEQ ID NO: 97600 - RNA, 22 nt, Artificial Sequence
  LRRK2 RNA guide
cggcuccuuaagaguccggguu

SEQ ID NO: 97601 - RNA, 22 nt, Artificial Sequence
  LRRK2 RNA guide
cggggagaaaagucaaaaaggu

SEQ ID NO: 97602 - RNA, 22 nt, Artificial Sequence
  LRRK2 RNA guide
cggguuggaagcaggugccacc

SEQ ID NO: 97603 - RNA, 22 nt, Artificial Sequence
  LRRK2 RNA guide
cggguuugagcagggucaaggg

SEQ ID NO: 97604 - RNA, 22 nt, Artificial Sequence
  LRRK2 RNA guide
cgguaaucacuugaaaauaaac

SEQ ID NO: 97605 - RNA, 22 nt, Artificial Sequence
  LRRK2 RNA guide
cggugagcugagcucgcccccg

SEQ ID NO: 97606 - RNA, 22 nt, Artificial Sequence
  LRRK2 RNA guide
cgguucccugagcagcggacgu

SEQ ID NO: 97607 - RNA, 22 nt, Artificial Sequence
  LRRK2 RNA guide
cguacuccgagcgcgguaauca

SEQ ID NO: 97608 - RNA, 22 nt, Artificial Sequence
  LRRK2 RNA guide
cguccgcugcucagggaaccgg

SEQ ID NO: 97609 - RNA, 22 nt, Artificial Sequence
  LRRK2 RNA guide
cguccucuucgcaccccugaca

SEQ ID NO: 97610 - RNA, 22 nt, Artificial Sequence
  LRRK2 RNA guide
cgugaacaccagcagauccucc

SEQ ID NO: 97611 - RNA, 22 nt, Artificial Sequence
  LRRK2 RNA guide
cguucaugcugggagggcggcg

SEQ ID NO: 97612 - RNA, 22 nt, Artificial Sequence
  LRRK2 RNA guide
cguuucuaucuguuuuccuucc

SEQ ID NO: 97613 - RNA, 22 nt, Artificial Sequence
  LRRK2 RNA guide
cuaaggaaaggauaugggaguu

SEQ ID NO: 97614 - RNA, 22 nt, Artificial Sequence
  LRRK2 RNA guide
cuagccaugguggcaccugcuu

SEQ ID NO: 97615 - RNA, 22 nt, Artificial Sequence
  LRRK2 RNA guide
cuaucaacuucuucagaguuuc

SEQ ID NO: 97616 - RNA, 22 nt, Artificial Sequence
  LRRK2 RNA guide
cuaucuguuuuccuuccuggac

SEQ ID NO: 97617 - RNA, 22 nt, Artificial Sequence
  LRRK2 RNA guide
cucaaacccggacucuuaagga

SEQ ID NO: 97618 - RNA, 22 nt, Artificial Sequence
  LRRK2 RNA guide
cucagcucaccgcccgcagcca

SEQ ID NO: 97619 - RNA, 22 nt, Artificial Sequence
  LRRK2 RNA guide
cucagcugcuuucugcccuaag

SEQ ID NO: 97620 - RNA, 22 nt, Artificial Sequence
  LRRK2 RNA guide
cuccaggauuuggaccagcguu

SEQ ID NO: 97621 - RNA, 22 nt, Artificial Sequence
  LRRK2 RNA guide
cucccagcaugaacguccgcug

SEQ ID NO: 97622 - RNA, 22 nt, Artificial Sequence
  LRRK2 RNA guide
cucccauauccuuuccuuaggg

SEQ ID NO: 97623 - RNA, 22 nt, Artificial Sequence
  LRRK2 RNA guide
cucccccuccuuacauuugcaa

SEQ ID NO: 97624 - RNA, 22 nt, Artificial Sequence
  LRRK2 RNA guide
cuccccgggggcgagcucagcu

SEQ ID NO: 97625 - RNA, 22 nt, Artificial Sequence
  LRRK2 RNA guide
cuccccuugacccugcucaaac

SEQ ID NO: 97626 - RNA, 22 nt, Artificial Sequence
  LRRK2 RNA guide
cuccgagcgcgguaaucacuug

SEQ ID NO: 97627 - RNA, 22 nt, Artificial Sequence
  LRRK2 RNA guide
cuccuccccuugacccugcuca

SEQ ID NO: 97628 - RNA, 22 nt, Artificial Sequence
  LRRK2 RNA guide
cuccuuaagaguccggguuuga

SEQ ID NO: 97629 - RNA, 22 nt, Artificial Sequence
  LRRK2 RNA guide
cuccuuacauuugcaaauuuug

SEQ ID NO: 97630 - RNA, 22 nt, Artificial Sequence
  LRRK2 RNA guide
cucggaguacgugaacaccagc

SEQ ID NO: 97631 - RNA, 22 nt, Artificial Sequence
  LRRK2 RNA guide
cucguccucuucgcaccccuga

SEQ ID NO: 97632 - RNA, 22 nt, Artificial Sequence
  LRRK2 RNA guide
cucugaagaaguugauagucag

SEQ ID NO: 97633 - RNA, 22 nt, Artificial Sequence
  LRRK2 RNA guide
cucuuaaggagccgcaaacucc

SEQ ID NO: 97634 - RNA, 22 nt, Artificial Sequence
  LRRK2 RNA guide
cucuucgcaccccugacagcug

SEQ ID NO: 97635 - RNA, 22 nt, Artificial Sequence
  LRRK2 RNA guide
cugaaacggggagaaaagucaa

SEQ ID NO: 97636 - RNA, 22 nt, Artificial Sequence
  LRRK2 RNA guide
cugaaauucucagcugcuuucu

SEQ ID NO: 97637 - RNA, 22 nt, Artificial Sequence
  LRRK2 RNA guide
cugaacaauguccaggaaggaa

SEQ ID NO: 97638 - RNA, 22 nt, Artificial Sequence
  LRRK2 RNA guide
cugaagaaguugauagucaggc

SEQ ID NO: 97639 - RNA, 22 nt, Artificial Sequence
  LRRK2 RNA guide
cugacagcugccacuagccaug

SEQ ID NO: 97640 - RNA, 22 nt, Artificial Sequence
  LRRK2 RNA guide
cugacuaucaacuucuucagag

SEQ ID NO: 97641 - RNA, 22 nt, Artificial Sequence
  LRRK2 RNA guide
cugagaauuucaggaaggucuu

SEQ ID NO: 97642 - RNA, 22 nt, Artificial Sequence
  LRRK2 RNA guide
cugagcagcggacguucaugcu

SEQ ID NO: 97643 - RNA, 22 nt, Artificial Sequence
  LRRK2 RNA guide
cugccacuagccaugguggcac

SEQ ID NO: 97644 - RNA, 22 nt, Artificial Sequence
  LRRK2 RNA guide
cugcccuaaggaaaggauaugg

SEQ ID NO: 97645 - RNA, 22 nt, Artificial Sequence
  LRRK2 RNA guide
cugccgguucccugagcagcgg

SEQ ID NO: 97646 - RNA, 22 nt, Artificial Sequence
  LRRK2 RNA guide
cugcucaaacccggacucuuaa

SEQ ID NO: 97647 - RNA, 22 nt, Artificial Sequence
  LRRK2 RNA guide
cugcucagggaaccggcagggg

SEQ ID NO: 97648 - RNA, 22 nt, Artificial Sequence
  LRRK2 RNA guide
cugcugguguucacguacuccg

SEQ ID NO: 97649 - RNA, 22 nt, Artificial Sequence
  LRRK2 RNA guide
cugcuuccaacccgccgcccuc

SEQ ID NO: 97650 - RNA, 22 nt, Artificial Sequence
  LRRK2 RNA guide
cugcuuucugcccuaaggaaag

SEQ ID NO: 97651 - RNA, 22 nt, Artificial Sequence
  LRRK2 RNA guide
cuggacauuguucagccugacu

SEQ ID NO: 97652 - RNA, 22 nt, Artificial Sequence
  LRRK2 RNA guide
cuggaggaucugcugguguuca

SEQ ID NO: 97653 - RNA, 22 nt, Artificial Sequence
  LRRK2 RNA guide
cuggcugcgggcggugagcuga

SEQ ID NO: 97654 - RNA, 22 nt, Artificial Sequence
  LRRK2 RNA guide
cugggagggcggcggguuggaa

SEQ ID NO: 97655 - RNA, 22 nt, Artificial Sequence
  LRRK2 RNA guide
cugguccaaauccuggaggauc

SEQ ID NO: 97656 - RNA, 22 nt, Artificial Sequence
  LRRK2 RNA guide
cugguguucacguacuccgagc

SEQ ID NO: 97657 - RNA, 22 nt, Artificial Sequence
  LRRK2 RNA guide
cugucaggggugcgaagaggac

SEQ ID NO: 97658 - RNA, 22 nt, Artificial Sequence
  LRRK2 RNA guide
cuguuuuccuuccuggacauug

SEQ ID NO: 97659 - RNA, 22 nt, Artificial Sequence
  LRRK2 RNA guide
cuuaagaguccggguuugagca

SEQ ID NO: 97660 - RNA, 22 nt, Artificial Sequence
  LRRK2 RNA guide
cuuaaggagccgcaaacuccca

SEQ ID NO: 97661 - RNA, 22 nt, Artificial Sequence
  LRRK2 RNA guide
cuuacauuugcaaauuuugucc

SEQ ID NO: 97662 - RNA, 22 nt, Artificial Sequence
  LRRK2 RNA guide
cuuagggcagaaagcagcugag

SEQ ID NO: 97663 - RNA, 22 nt, Artificial Sequence
  LRRK2 RNA guide
cuucaccuuuuugacuuuucuc

SEQ ID NO: 97664 - RNA, 22 nt, Artificial Sequence
  LRRK2 RNA guide
cuuccaacccgccgcccuccca

SEQ ID NO: 97665 - RNA, 22 nt, Artificial Sequence
  LRRK2 RNA guide
cuuccugaaauucucagcugcu

SEQ ID NO: 97666 - RNA, 22 nt, Artificial Sequence
  LRRK2 RNA guide
cuuccuggacauuguucagccu

SEQ ID NO: 97667 - RNA, 22 nt, Artificial Sequence
  LRRK2 RNA guide
cuucgcaccccugacagcugcc

SEQ ID NO: 97668 - RNA, 22 nt, Artificial Sequence
  LRRK2 RNA guide
cuugacccugcucaaacccgga

SEQ ID NO: 97669 - RNA, 22 nt, Artificial Sequence
  LRRK2 RNA guide
cuuuccuuagggcagaaagcag

SEQ ID NO: 97670 - RNA, 22 nt, Artificial Sequence
  LRRK2 RNA guide
cuuucucccccuccuuacauuu

SEQ ID NO: 97671 - RNA, 22 nt, Artificial Sequence
  LRRK2 RNA guide
cuuucugcccuaaggaaaggau

SEQ ID NO: 97672 - RNA, 22 nt, Artificial Sequence
  LRRK2 RNA guide
cuuuuauuuuugcaaacuuucu

SEQ ID NO: 97673 - RNA, 22 nt, Artificial Sequence
  LRRK2 RNA guide
cuuuucuccccguuucagacua

SEQ ID NO: 97674 - RNA, 22 nt, Artificial Sequence
  LRRK2 RNA guide
cuuuuuagucugaaacggggag

SEQ ID NO: 97675 - RNA, 22 nt, Artificial Sequence
  LRRK2 RNA guide
cuuuuugacuuuucuccccguu

SEQ ID NO: 97676 - RNA, 22 nt, Artificial Sequence
  LRRK2 RNA guide
gaaaacagauagaaacgcuggu

SEQ ID NO: 97677 - RNA, 22 nt, Artificial Sequence
  LRRK2 RNA guide
gaaaagucaaaaaggugaagac

SEQ ID NO: 97678 - RNA, 22 nt, Artificial Sequence
  LRRK2 RNA guide
gaaacgcugguccaaauccugg

SEQ ID NO: 97679 - RNA, 22 nt, Artificial Sequence
  LRRK2 RNA guide
gaaacggggagaaaagucaaaa

SEQ ID NO: 97680 - RNA, 22 nt, Artificial Sequence
  LRRK2 RNA guide
gaaacucugaagaaguugauag

SEQ ID NO: 97681 - RNA, 22 nt, Artificial Sequence
  LRRK2 RNA guide
gaaagcagcugagaauuucagg

SEQ ID NO: 97682 - RNA, 22 nt, Artificial Sequence
  LRRK2 RNA guide
gaaaggauaugggaguuugcgg

SEQ ID NO: 97683 - RNA, 22 nt, Artificial Sequence
  LRRK2 RNA guide
gaaauucucagcugcuuucugc

SEQ ID NO: 97684 - RNA, 22 nt, Artificial Sequence
  LRRK2 RNA guide
gaacaauguccaggaaggaaaa

SEQ ID NO: 97685 - RNA, 22 nt, Artificial Sequence
  LRRK2 RNA guide
gaacaccagcagauccuccagg

SEQ ID NO: 97686 - RNA, 22 nt, Artificial Sequence
  LRRK2 RNA guide
gaaccggcaggggcgccggcca

SEQ ID NO: 97687 - RNA, 22 nt, Artificial Sequence
  LRRK2 RNA guide
gaacguccgcugcucagggaac

SEQ ID NO: 97688 - RNA, 22 nt, Artificial Sequence
  LRRK2 RNA guide
gaagaaguugauagucaggcug

SEQ ID NO: 97689 - RNA, 22 nt, Artificial Sequence
  LRRK2 RNA guide
gaagaccuuccugaaauucuca

SEQ ID NO: 97690 - RNA, 22 nt, Artificial Sequence
  LRRK2 RNA guide
gaagaggacgaggaaacucuga

SEQ ID NO: 97691 - RNA, 22 nt, Artificial Sequence
  LRRK2 RNA guide
gaagcaggugccaccauggcua

SEQ ID NO: 97692 - RNA, 22 nt, Artificial Sequence
  LRRK2 RNA guide
gaaggaaaacagauagaaacgc

SEQ ID NO: 97693 - RNA, 22 nt, Artificial Sequence
  LRRK2 RNA guide
gaaggucuucaccuuuuugacu

SEQ ID NO: 97694 - RNA, 22 nt, Artificial Sequence
  LRRK2 RNA guide
gaaguugauagucaggcugaac

SEQ ID NO: 97695 - RNA, 22 nt, Artificial Sequence
  LRRK2 RNA guide
gaauuucaggaaggucuucacc

SEQ ID NO: 97696 - RNA, 22 nt, Artificial Sequence
  LRRK2 RNA guide
gacaaaauuugcaaauguaagg

SEQ ID NO: 97697 - RNA, 22 nt, Artificial Sequence
  LRRK2 RNA guide
gacagcugccacuagccauggu

SEQ ID NO: 97698 - RNA, 22 nt, Artificial Sequence
  LRRK2 RNA guide
gacauuguucagccugacuauc

SEQ ID NO: 97699 - RNA, 22 nt, Artificial Sequence
  LRRK2 RNA guide
gaccagcguuucuaucuguuuu

SEQ ID NO: 97700 - RNA, 22 nt, Artificial Sequence
  LRRK2 RNA guide
gacccugcucaaacccggacuc

SEQ ID NO: 97701 - RNA, 22 nt, Artificial Sequence
  LRRK2 RNA guide
gaccuuccugaaauucucagcu

SEQ ID NO: 97702 - RNA, 22 nt, Artificial Sequence
  LRRK2 RNA guide
gacgaggaaacucugaagaagu

SEQ ID NO: 97703 - RNA, 22 nt, Artificial Sequence
  LRRK2 RNA guide
gacguucaugcugggagggcgg

SEQ ID NO: 97704 - RNA, 22 nt, Artificial Sequence
  LRRK2 RNA guide
gacuaucaacuucuucagaguu

SEQ ID NO: 97705 - RNA, 22 nt, Artificial Sequence
  LRRK2 RNA guide
gacucuuaaggagccgcaaacu

SEQ ID NO: 97706 - RNA, 22 nt, Artificial Sequence
  LRRK2 RNA guide
gacuuuucuccccguuucagac

SEQ ID NO: 97707 - RNA, 22 nt, Artificial Sequence
  LRRK2 RNA guide
gagaaaagucaaaaaggugaag

SEQ ID NO: 97708 - RNA, 22 nt, Artificial Sequence
  LRRK2 RNA guide
gagaauuucaggaaggucuuca

SEQ ID NO: 97709 - RNA, 22 nt, Artificial Sequence
  LRRK2 RNA guide
gagcagcggacguucaugcugg

SEQ ID NO: 97710 - RNA, 22 nt, Artificial Sequence
  LRRK2 RNA guide
gagcagggucaaggggaggagg

SEQ ID NO: 97711 - RNA, 22 nt, Artificial Sequence
  LRRK2 RNA guide
gagccgcaaacucccauauccu

SEQ ID NO: 97712 - RNA, 22 nt, Artificial Sequence
  LRRK2 RNA guide
gagcgcgguaaucacuugaaaa

SEQ ID NO: 97713 - RNA, 22 nt, Artificial Sequence
  LRRK2 RNA guide
gagcgcuggcugcgggcgguga

SEQ ID NO: 97714 - RNA, 22 nt, Artificial Sequence
  LRRK2 RNA guide
gagcucagcucaccgcccgcag

SEQ ID NO: 97715 - RNA, 22 nt, Artificial Sequence
  LRRK2 RNA guide
gagcugagcucgcccccgggga

SEQ ID NO: 97716 - RNA, 22 nt, Artificial Sequence
  LRRK2 RNA guide
gagcuguggccggcgccccugc

SEQ ID NO: 97717 - RNA, 22 nt, Artificial Sequence
  LRRK2 RNA guide
gaggaaacucugaagaaguuga

SEQ ID NO: 97718 - RNA, 22 nt, Artificial Sequence
  LRRK2 RNA guide
gaggacaaaauuugcaaaugua

SEQ ID NO: 97719 - RNA, 22 nt, Artificial Sequence
  LRRK2 RNA guide
gaggacgaggaaacucugaaga

SEQ ID NO: 97720 - RNA, 22 nt, Artificial Sequence
  LRRK2 RNA guide
gaggaggacaaaauuugcaaau

SEQ ID NO: 97721 - RNA, 22 nt, Artificial Sequence
  LRRK2 RNA guide
gaggaucugcugguguucacgu

SEQ ID NO: 97722 - RNA, 22 nt, Artificial Sequence
  LRRK2 RNA guide
gagggcggcggguuggaagcag

SEQ ID NO: 97723 - RNA, 22 nt, Artificial Sequence
  LRRK2 RNA guide
gagggggagaaaguuugcaaaa

SEQ ID NO: 97724 - RNA, 22 nt, Artificial Sequence
  LRRK2 RNA guide
gaguacgugaacaccagcagau

SEQ ID NO: 97725 - RNA, 22 nt, Artificial Sequence
  LRRK2 RNA guide
gaguccggguuugagcaggguc

SEQ ID NO: 97726 - RNA, 22 nt, Artificial Sequence
  LRRK2 RNA guide
gaguuuccucguccucuucgca

SEQ ID NO: 97727 - RNA, 22 nt, Artificial Sequence
  LRRK2 RNA guide
gaguuugcggcuccuuaagagu

SEQ ID NO: 97728 - RNA, 22 nt, Artificial Sequence
  LRRK2 RNA guide
gauagaaacgcugguccaaauc

SEQ ID NO: 97729 - RNA, 22 nt, Artificial Sequence
  LRRK2 RNA guide
gauagucaggcugaacaauguc

SEQ ID NO: 97730 - RNA, 22 nt, Artificial Sequence
  LRRK2 RNA guide
gauaugggaguuugcggcuccu

SEQ ID NO: 97731 - RNA, 22 nt, Artificial Sequence
  LRRK2 RNA guide
gaucugcugguguucacguacu

SEQ ID NO: 97732 - RNA, 22 nt, Artificial Sequence
  LRRK2 RNA guide
gauuaccgcgcucggaguacgu

SEQ ID NO: 97733 - RNA, 22 nt, Artificial Sequence
  LRRK2 RNA guide
gauuuggaccagcguuucuauc

SEQ ID NO: 97734 - RNA, 22 nt, Artificial Sequence
  LRRK2 RNA guide
gcaaacucccauauccuuuccu

SEQ ID NO: 97735 - RNA, 22 nt, Artificial Sequence
  LRRK2 RNA guide
gcaaacuuucucccccuccuua

SEQ ID NO: 97736 - RNA, 22 nt, Artificial Sequence
  LRRK2 RNA guide
gcaaauguaaggagggggagaa

SEQ ID NO: 97737 - RNA, 22 nt, Artificial Sequence
  LRRK2 RNA guide
gcaaauuuuguccuccuccccu

SEQ ID NO: 97738 - RNA, 22 nt, Artificial Sequence
  LRRK2 RNA guide
gcacaguuuauuuucaagugau

SEQ ID NO: 97739 - RNA, 22 nt, Artificial Sequence
  LRRK2 RNA guide
gcaccccugacagcugccacua

SEQ ID NO: 97740 - RNA, 22 nt, Artificial Sequence
  LRRK2 RNA guide
gcaccugcuuccaacccgccgc

SEQ ID NO: 97741 - RNA, 22 nt, Artificial Sequence
  LRRK2 RNA guide
gcagaaagcagcugagaauuuc

SEQ ID NO: 97742 - RNA, 22 nt, Artificial Sequence
  LRRK2 RNA guide
gcagcggacguucaugcuggga

SEQ ID NO: 97743 - RNA, 22 nt, Artificial Sequence
  LRRK2 RNA guide
gcagcugagaauuucaggaagg

SEQ ID NO: 97744 - RNA, 22 nt, Artificial Sequence
  LRRK2 RNA guide
gcagcugucaggggugcgaaga

SEQ ID NO: 97745 - RNA, 22 nt, Artificial Sequence
  LRRK2 RNA guide
gcagggucaaggggaggaggac

SEQ ID NO: 97746 - RNA, 22 nt, Artificial Sequence
  LRRK2 RNA guide
gcaggugccaccauggcuagug

SEQ ID NO: 97747 - RNA, 22 nt, Artificial Sequence
  LRRK2 RNA guide
gcaugaacguccgcugcucagg

SEQ ID NO: 97748 - RNA, 22 nt, Artificial Sequence
  LRRK2 RNA guide
gccacagcuccccgggggcgag

SEQ ID NO: 97749 - RNA, 22 nt, Artificial Sequence
  LRRK2 RNA guide
gccaccauggcuaguggcagcu

SEQ ID NO: 97750 - RNA, 22 nt, Artificial Sequence
  LRRK2 RNA guide
gccacuagccaugguggcaccu

SEQ ID NO: 97751 - RNA, 22 nt, Artificial Sequence
  LRRK2 RNA guide
gccaugguggcaccugcuucca

SEQ ID NO: 97752 - RNA, 22 nt, Artificial Sequence
  LRRK2 RNA guide
gcccuaaggaaaggauauggga

SEQ ID NO: 97753 - RNA, 22 nt, Artificial Sequence
  LRRK2 RNA guide
gcccucccagcaugaacguccg

SEQ ID NO: 97754 - RNA, 22 nt, Artificial Sequence
  LRRK2 RNA guide
gccgcaaacucccauauccuuu

SEQ ID NO: 97755 - RNA, 22 nt, Artificial Sequence
  LRRK2 RNA guide
gccgguucccugagcagcggac

SEQ ID NO: 97756 - RNA, 22 nt, Artificial Sequence
  LRRK2 RNA guide
gccugacuaucaacuucuucag

SEQ ID NO: 97757 - RNA, 22 nt, Artificial Sequence
  LRRK2 RNA guide
gcgaagaggacgaggaaacucu

SEQ ID NO: 97758 - RNA, 22 nt, Artificial Sequence
  LRRK2 RNA guide
gcgagcucagcucaccgcccgc

SEQ ID NO: 97759 - RNA, 22 nt, Artificial Sequence
  LRRK2 RNA guide
gcgccccugccgguucccugag

SEQ ID NO: 97760 - RNA, 22 nt, Artificial Sequence
  LRRK2 RNA guide
gcgcgguaaucacuugaaaaua

SEQ ID NO: 97761 - RNA, 22 nt, Artificial Sequence
  LRRK2 RNA guide
gcgcucggaguacgugaacacc

SEQ ID NO: 97762 - RNA, 22 nt, Artificial Sequence
  LRRK2 RNA guide
gcgcuggcugcgggcggugagc

SEQ ID NO: 97763 - RNA, 22 nt, Artificial Sequence
  LRRK2 RNA guide
gcggacguucaugcugggaggg

SEQ ID NO: 97764 - RNA, 22 nt, Artificial Sequence
  LRRK2 RNA guide
gcggcggguuggaagcaggugc

SEQ ID NO: 97765 - RNA, 22 nt, Artificial Sequence
  LRRK2 RNA guide
gcggcuccuuaagaguccgggu

SEQ ID NO: 97766 - RNA, 22 nt, Artificial Sequence
  LRRK2 RNA guide
gcggguuggaagcaggugccac

SEQ ID NO: 97767 - RNA, 22 nt, Artificial Sequence
  LRRK2 RNA guide
gcgguaaucacuugaaaauaaa

SEQ ID NO: 97768 - RNA, 22 nt, Artificial Sequence
  LRRK2 RNA guide
gcggugagcugagcucgccccc

SEQ ID NO: 97769 - RNA, 22 nt, Artificial Sequence
  LRRK2 RNA guide
gcguuucuaucuguuuuccuuc

SEQ ID NO: 97770 - RNA, 22 nt, Artificial Sequence
  LRRK2 RNA guide
gcucaaacccggacucuuaagg

SEQ ID NO: 97771 - RNA, 22 nt, Artificial Sequence
  LRRK2 RNA guide
gcucagcucaccgcccgcagcc

SEQ ID NO: 97772 - RNA, 22 nt, Artificial Sequence
  LRRK2 RNA guide
gcuccccgggggcgagcucagc

SEQ ID NO: 97773 - RNA, 22 nt, Artificial Sequence
  LRRK2 RNA guide
gcuccuuaagaguccggguuug

SEQ ID NO: 97774 - RNA, 22 nt, Artificial Sequence
  LRRK2 RNA guide
gcucggaguacgugaacaccag

SEQ ID NO: 97775 - RNA, 22 nt, Artificial Sequence
  LRRK2 RNA guide
gcugaacaauguccaggaagga

SEQ ID NO: 97776 - RNA, 22 nt, Artificial Sequence
  LRRK2 RNA guide
gcugagaauuucaggaaggucu

SEQ ID NO: 97777 - RNA, 22 nt, Artificial Sequence
  LRRK2 RNA guide
gcugagcucgcccccggggagc

SEQ ID NO: 97778 - RNA, 22 nt, Artificial Sequence
  LRRK2 RNA guide
gcugccacuagccaugguggca

SEQ ID NO: 97779 - RNA, 22 nt, Artificial Sequence
  LRRK2 RNA guide
gcugcucagggaaccggcaggg

SEQ ID NO: 97780 - RNA, 22 nt, Artificial Sequence
  LRRK2 RNA guide
gcugcuuucugcccuaaggaaa

SEQ ID NO: 97781 - RNA, 22 nt, Artificial Sequence
  LRRK2 RNA guide
gcuggcugcgggcggugagcug

SEQ ID NO: 97782 - RNA, 22 nt, Artificial Sequence
  LRRK2 RNA guide
gcugggagggcggcggguugga

SEQ ID NO: 97783 - RNA, 22 nt, Artificial Sequence
  LRRK2 RNA guide
gcugguccaaauccuggaggau

SEQ ID NO: 97784 - RNA, 22 nt, Artificial Sequence
  LRRK2 RNA guide
gcugguguucacguacuccgag

SEQ ID NO: 97785 - RNA, 22 nt, Artificial Sequence
  LRRK2 RNA guide
gcugucaggggugcgaagagga

SEQ ID NO: 97786 - RNA, 22 nt, Artificial Sequence
  LRRK2 RNA guide
gcuuccaacccgccgcccuccc

SEQ ID NO: 97787 - RNA, 22 nt, Artificial Sequence
  LRRK2 RNA guide
gcuuucugcccuaaggaaagga

SEQ ID NO: 97788 - RNA, 22 nt, Artificial Sequence
  LRRK2 RNA guide
gcuuuuauuuuugcaaacuuuc

SEQ ID NO: 97789 - RNA, 22 nt, Artificial Sequence
  LRRK2 RNA guide
ggaaaacagauagaaacgcugg

SEQ ID NO: 97790 - RNA, 22 nt, Artificial Sequence
  LRRK2 RNA guide
ggaaacucugaagaaguugaua

SEQ ID NO: 97791 - RNA, 22 nt, Artificial Sequence
  LRRK2 RNA guide
ggaaaggauaugggaguuugcg

SEQ ID NO: 97792 - RNA, 22 nt, Artificial Sequence
  LRRK2 RNA guide
ggaagcaggugccaccauggcu

SEQ ID NO: 97793 - RNA, 22 nt, Artificial Sequence
  LRRK2 RNA guide
ggaaggaaaacagauagaaacg

SEQ ID NO: 97794 - RNA, 22 nt, Artificial Sequence
  LRRK2 RNA guide
ggaaggucuucaccuuuuugac

SEQ ID NO: 97795 - RNA, 22 nt, Artificial Sequence
  LRRK2 RNA guide
ggacaaaauuugcaaauguaag

SEQ ID NO: 97796 - RNA, 22 nt, Artificial Sequence
  LRRK2 RNA guide
ggacauuguucagccugacuau

SEQ ID NO: 97797 - RNA, 22 nt, Artificial Sequence
  LRRK2 RNA guide
ggaccagcguuucuaucuguuu

SEQ ID NO: 97798 - RNA, 22 nt, Artificial Sequence
  LRRK2 RNA guide
ggacgaggaaacucugaagaag

SEQ ID NO: 97799 - RNA, 22 nt, Artificial Sequence
  LRRK2 RNA guide
ggacguucaugcugggagggcg

SEQ ID NO: 97800 - RNA, 22 nt, Artificial Sequence
  LRRK2 RNA guide
ggacucuuaaggagccgcaaac

SEQ ID NO: 97801 - RNA, 22 nt, Artificial Sequence
  LRRK2 RNA guide
ggagaaaagucaaaaaggugaa

SEQ ID NO: 97802 - RNA, 22 nt, Artificial Sequence
  LRRK2 RNA guide
ggagaaaguuugcaaaaauaaa

SEQ ID NO: 97803 - RNA, 22 nt, Artificial Sequence
  LRRK2 RNA guide
ggagccgcaaacucccauaucc

SEQ ID NO: 97804 - RNA, 22 nt, Artificial Sequence
  LRRK2 RNA guide
ggagcgcuggcugcgggcggug

SEQ ID NO: 97805 - RNA, 22 nt, Artificial Sequence
  LRRK2 RNA guide
ggaggacaaaauuugcaaaugu

SEQ ID NO: 97806 - RNA, 22 nt, Artificial Sequence
  LRRK2 RNA guide
ggaggaggacaaaauuugcaaa

SEQ ID NO: 97807 - RNA, 22 nt, Artificial Sequence
  LRRK2 RNA guide
ggaggaucugcugguguucacg

SEQ ID NO: 97808 - RNA, 22 nt, Artificial Sequence
  LRRK2 RNA guide
ggagggcggcggguuggaagca

SEQ ID NO: 97809 - RNA, 22 nt, Artificial Sequence
  LRRK2 RNA guide
ggagggggagaaaguuugcaaa

SEQ ID NO: 97810 - RNA, 22 nt, Artificial Sequence
  LRRK2 RNA guide
ggaguacgugaacaccagcaga

SEQ ID NO: 97811 - RNA, 22 nt, Artificial Sequence
  LRRK2 RNA guide
ggaguuugcggcuccuuaagag

SEQ ID NO: 97812 - RNA, 22 nt, Artificial Sequence
  LRRK2 RNA guide
ggauaugggaguuugcggcucc

SEQ ID NO: 97813 - RNA, 22 nt, Artificial Sequence
  LRRK2 RNA guide
ggaucugcugguguucacguac

SEQ ID NO: 97814 - RNA, 22 nt, Artificial Sequence
  LRRK2 RNA guide
ggauuuggaccagcguuucuau

SEQ ID NO: 97815 - RNA, 22 nt, Artificial Sequence
  LRRK2 RNA guide
ggcaccugcuuccaacccgccg

SEQ ID NO: 97816 - RNA, 22 nt, Artificial Sequence
  LRRK2 RNA guide
ggcagaaagcagcugagaauuu

SEQ ID NO: 97817 - RNA, 22 nt, Artificial Sequence
  LRRK2 RNA guide
ggcagcugucaggggugcgaag

SEQ ID NO: 97818 - RNA, 22 nt, Artificial Sequence
  LRRK2 RNA guide
ggccacagcuccccgggggcga

SEQ ID NO: 97819 - RNA, 22 nt, Artificial Sequence
  LRRK2 RNA guide
ggcgagcucagcucaccgcccg

SEQ ID NO: 97820 - RNA, 22 nt, Artificial Sequence
  LRRK2 RNA guide
ggcgccccugccgguucccuga

SEQ ID NO: 97821 - RNA, 22 nt, Artificial Sequence
  LRRK2 RNA guide
ggcggcggguuggaagcaggug

SEQ ID NO: 97822 - RNA, 22 nt, Artificial Sequence
  LRRK2 RNA guide
ggcggguuggaagcaggugcca

SEQ ID NO: 97823 - RNA, 22 nt, Artificial Sequence
  LRRK2 RNA guide
ggcuccuuaagaguccggguuu

SEQ ID NO: 97824 - RNA, 22 nt, Artificial Sequence
  LRRK2 RNA guide
ggcugaacaauguccaggaagg

SEQ ID NO: 97825 - RNA, 22 nt, Artificial Sequence
  LRRK2 RNA guide
gggagaaaagucaaaaagguga

SEQ ID NO: 97826 - RNA, 22 nt, Artificial Sequence
  LRRK2 RNA guide
gggagaaaguuugcaaaaauaa

SEQ ID NO: 97827 - RNA, 22 nt, Artificial Sequence
  LRRK2 RNA guide
gggagcgcuggcugcgggcggu

SEQ ID NO: 97828 - RNA, 22 nt, Artificial Sequence
  LRRK2 RNA guide
gggaggaggacaaaauuugcaa

SEQ ID NO: 97829 - RNA, 22 nt, Artificial Sequence
  LRRK2 RNA guide
gggagggcggcggguuggaagc

SEQ ID NO: 97830 - RNA, 22 nt, Artificial Sequence
  LRRK2 RNA guide
gggaguuugcggcuccuuaaga

SEQ ID NO: 97831 - RNA, 22 nt, Artificial Sequence
  LRRK2 RNA guide
gggcagaaagcagcugagaauu

SEQ ID NO: 97832 - RNA, 22 nt, Artificial Sequence
  LRRK2 RNA guide
gggcgagcucagcucaccgccc

SEQ ID NO: 97833 - RNA, 22 nt, Artificial Sequence
  LRRK2 RNA guide
gggcggcggguuggaagcaggu

SEQ ID NO: 97834 - RNA, 22 nt, Artificial Sequence
  LRRK2 RNA guide
ggggagaaaagucaaaaaggug

SEQ ID NO: 97835 - RNA, 22 nt, Artificial Sequence
  LRRK2 RNA guide
ggggagaaaguuugcaaaaaua

SEQ ID NO: 97836 - RNA, 22 nt, Artificial Sequence
  LRRK2 RNA guide
ggggaggaggacaaaauuugca

SEQ ID NO: 97837 - RNA, 22 nt, Artificial Sequence
  LRRK2 RNA guide
ggggcgagcucagcucaccgcc

SEQ ID NO: 97838 - RNA, 22 nt, Artificial Sequence
  LRRK2 RNA guide
gggggagaaaguuugcaaaaau

SEQ ID NO: 97839 - RNA, 22 nt, Artificial Sequence
  LRRK2 RNA guide
gggggcgagcucagcucaccgc

SEQ ID NO: 97840 - RNA, 22 nt, Artificial Sequence
  LRRK2 RNA guide
ggggugcgaagaggacgaggaa

SEQ ID NO: 97841 - RNA, 22 nt, Artificial Sequence
  LRRK2 RNA guide
gggucaaggggaggaggacaaa

SEQ ID NO: 97842 - RNA, 22 nt, Artificial Sequence
  LRRK2 RNA guide
gggugcgaagaggacgaggaaa

SEQ ID NO: 97843 - RNA, 22 nt, Artificial Sequence
  LRRK2 RNA guide
ggguuggaagcaggugccacca

SEQ ID NO: 97844 - RNA, 22 nt, Artificial Sequence
  LRRK2 RNA guide
ggguuugagcagggucaagggg

SEQ ID NO: 97845 - RNA, 22 nt, Artificial Sequence
  LRRK2 RNA guide
gguaaucacuugaaaauaaacu

SEQ ID NO: 97846 - RNA, 22 nt, Artificial Sequence
  LRRK2 RNA guide
ggucaaggggaggaggacaaaa

SEQ ID NO: 97847 - RNA, 22 nt, Artificial Sequence
  LRRK2 RNA guide
gguccaaauccuggaggaucug

SEQ ID NO: 97848 - RNA, 22 nt, Artificial Sequence
  LRRK2 RNA guide
ggucuucaccuuuuugacuuuu

SEQ ID NO: 97849 - RNA, 22 nt, Artificial Sequence
  LRRK2 RNA guide
ggugaagaccuuccugaaauuc

SEQ ID NO: 97850 - RNA, 22 nt, Artificial Sequence
  LRRK2 RNA guide
ggugagcugagcucgcccccgg

SEQ ID NO: 97851 - RNA, 22 nt, Artificial Sequence
  LRRK2 RNA guide
ggugccaccauggcuaguggca

SEQ ID NO: 97852 - RNA, 22 nt, Artificial Sequence
  LRRK2 RNA guide
ggugcgaagaggacgaggaaac

SEQ ID NO: 97853 - RNA, 22 nt, Artificial Sequence
  LRRK2 RNA guide
gguggcaccugcuuccaacccg

SEQ ID NO: 97854 - RNA, 22 nt, Artificial Sequence
  LRRK2 RNA guide
gguguucacguacuccgagcgc

SEQ ID NO: 97855 - RNA, 22 nt, Artificial Sequence
  LRRK2 RNA guide
gguucccugagcagcggacguu

SEQ ID NO: 97856 - RNA, 22 nt, Artificial Sequence
  LRRK2 RNA guide
gguuggaagcaggugccaccau

SEQ ID NO: 97857 - RNA, 22 nt, Artificial Sequence
  LRRK2 RNA guide
gguuugagcagggucaagggga

SEQ ID NO: 97858 - RNA, 22 nt, Artificial Sequence
  LRRK2 RNA guide
guaaggagggggagaaaguuug

SEQ ID NO: 97859 - RNA, 22 nt, Artificial Sequence
  LRRK2 RNA guide
guacgugaacaccagcagaucc

SEQ ID NO: 97860 - RNA, 22 nt, Artificial Sequence
  LRRK2 RNA guide
guacuccgagcgcgguaaucac

SEQ ID NO: 97861 - RNA, 22 nt, Artificial Sequence
  LRRK2 RNA guide
gucaaaaaggugaagaccuucc

SEQ ID NO: 97862 - RNA, 22 nt, Artificial Sequence
  LRRK2 RNA guide
gucaaggggaggaggacaaaau

SEQ ID NO: 97863 - RNA, 22 nt, Artificial Sequence
  LRRK2 RNA guide
gucaggcugaacaauguccagg

SEQ ID NO: 97864 - RNA, 22 nt, Artificial Sequence
  LRRK2 RNA guide
gucaggggugcgaagaggacga

SEQ ID NO: 97865 - RNA, 22 nt, Artificial Sequence
  LRRK2 RNA guide
guccaaauccuggaggaucugc

SEQ ID NO: 97866 - RNA, 22 nt, Artificial Sequence
  LRRK2 RNA guide
guccgcugcucagggaaccggc

SEQ ID NO: 97867 - RNA, 22 nt, Artificial Sequence
  LRRK2 RNA guide
guccggguuugagcagggucaa

SEQ ID NO: 97868 - RNA, 22 nt, Artificial Sequence
  LRRK2 RNA guide
guccuccuccccuugacccugc

SEQ ID NO: 97869 - RNA, 22 nt, Artificial Sequence
  LRRK2 RNA guide
guccucuucgcaccccugacag

SEQ ID NO: 97870 - RNA, 22 nt, Artificial Sequence
  LRRK2 RNA guide
gucugaaacggggagaaaaguc

SEQ ID NO: 97871 - RNA, 22 nt, Artificial Sequence
  LRRK2 RNA guide
gucuucaccuuuuugacuuuuc

SEQ ID NO: 97872 - RNA, 22 nt, Artificial Sequence
  LRRK2 RNA guide
gugaacaccagcagauccucca

SEQ ID NO: 97873 - RNA, 22 nt, Artificial Sequence
  LRRK2 RNA guide
gugaagaccuuccugaaauucu

SEQ ID NO: 97874 - RNA, 22 nt, Artificial Sequence
  LRRK2 RNA guide
gugagcugagcucgcccccggg

SEQ ID NO: 97875 - RNA, 22 nt, Artificial Sequence
  LRRK2 RNA guide
gugauuaccgcgcucggaguac

SEQ ID NO: 97876 - RNA, 22 nt, Artificial Sequence
  LRRK2 RNA guide
gugccaccauggcuaguggcag

SEQ ID NO: 97877 - RNA, 22 nt, Artificial Sequence
  LRRK2 RNA guide
gugcgaagaggacgaggaaacu

SEQ ID NO: 97878 - RNA, 22 nt, Artificial Sequence
  LRRK2 RNA guide
gugcuuuuauuuuugcaaacuu

SEQ ID NO: 97879 - RNA, 22 nt, Artificial Sequence
  LRRK2 RNA guide
guggcaccugcuuccaacccgc

SEQ ID NO: 97880 - RNA, 22 nt, Artificial Sequence
  LRRK2 RNA guide
guggcagcugucaggggugcga

SEQ ID NO: 97881 - RNA, 22 nt, Artificial Sequence
  LRRK2 RNA guide
guguucacguacuccgagcgcg

SEQ ID NO: 97882 - RNA, 22 nt, Artificial Sequence
  LRRK2 RNA guide
guucacguacuccgagcgcggu

SEQ ID NO: 97883 - RNA, 22 nt, Artificial Sequence
  LRRK2 RNA guide
guucagccugacuaucaacuuc

SEQ ID NO: 97884 - RNA, 22 nt, Artificial Sequence
  LRRK2 RNA guide
guucaugcugggagggcggcgg

SEQ ID NO: 97885 - RNA, 22 nt, Artificial Sequence
  LRRK2 RNA guide
guucccugagcagcggacguuc

SEQ ID NO: 97886 - RNA, 22 nt, Artificial Sequence
  LRRK2 RNA guide
guugauagucaggcugaacaau

SEQ ID NO: 97887 - RNA, 22 nt, Artificial Sequence
  LRRK2 RNA guide
guuggaagcaggugccaccaug

SEQ ID NO: 97888 - RNA, 22 nt, Artificial Sequence
  LRRK2 RNA guide
guuuccucguccucuucgcacc

SEQ ID NO: 97889 - RNA, 22 nt, Artificial Sequence
  LRRK2 RNA guide
guuucuaucuguuuuccuuccu

SEQ ID NO: 97890 - RNA, 22 nt, Artificial Sequence
  LRRK2 RNA guide
guuugagcagggucaaggggag

SEQ ID NO: 97891 - RNA, 22 nt, Artificial Sequence
  LRRK2 RNA guide
guuugcggcuccuuaagagucc

SEQ ID NO: 97892 - RNA, 22 nt, Artificial Sequence
  LRRK2 RNA guide
guuuuccuuccuggacauuguu

SEQ ID NO: 97893 - RNA, 22 nt, Artificial Sequence
  LRRK2 RNA guide
uaagaguccggguuugagcagg

SEQ ID NO: 97894 - RNA, 22 nt, Artificial Sequence
  LRRK2 RNA guide
uaaggaaaggauaugggaguuu

SEQ ID NO: 97895 - RNA, 22 nt, Artificial Sequence
  LRRK2 RNA guide
uaaggagccgcaaacucccaua

SEQ ID NO: 97896 - RNA, 22 nt, Artificial Sequence
  LRRK2 RNA guide
uaaggagggggagaaaguuugc

SEQ ID NO: 97897 - RNA, 22 nt, Artificial Sequence
  LRRK2 RNA guide
uacauuugcaaauuuuguccuc

SEQ ID NO: 97898 - RNA, 22 nt, Artificial Sequence
  LRRK2 RNA guide
uaccgcgcucggaguacgugaa

SEQ ID NO: 97899 - RNA, 22 nt, Artificial Sequence
  LRRK2 RNA guide
uacgugaacaccagcagauccu

SEQ ID NO: 97900 - RNA, 22 nt, Artificial Sequence
  LRRK2 RNA guide
uacuccgagcgcgguaaucacu

SEQ ID NO: 97901 - RNA, 22 nt, Artificial Sequence
  LRRK2 RNA guide
uagaaacgcugguccaaauccu

SEQ ID NO: 97902 - RNA, 22 nt, Artificial Sequence
  LRRK2 RNA guide
uagccaugguggcaccugcuuc

SEQ ID NO: 97903 - RNA, 22 nt, Artificial Sequence
  LRRK2 RNA guide
uagggcagaaagcagcugagaa

SEQ ID NO: 97904 - RNA, 22 nt, Artificial Sequence
  LRRK2 RNA guide
uagucaggcugaacaaugucca

SEQ ID NO: 97905 - RNA, 22 nt, Artificial Sequence
  LRRK2 RNA guide
uagucugaaacggggagaaaag

SEQ ID NO: 97906 - RNA, 22 nt, Artificial Sequence
  LRRK2 RNA guide
uaucaacuucuucagaguuucc

SEQ ID NO: 97907 - RNA, 22 nt, Artificial Sequence
  LRRK2 RNA guide
uauccuuuccuuagggcagaaa

SEQ ID NO: 97908 - RNA, 22 nt, Artificial Sequence
  LRRK2 RNA guide
uaucuguuuuccuuccuggaca

SEQ ID NO: 97909 - RNA, 22 nt, Artificial Sequence
  LRRK2 RNA guide
uaugggaguuugcggcuccuua

SEQ ID NO: 97910 - RNA, 22 nt, Artificial Sequence
  LRRK2 RNA guide
uauuuucaagugauuaccgcgc

SEQ ID NO: 97911 - RNA, 22 nt, Artificial Sequence
  LRRK2 RNA guide
uauuuuugcaaacuuucucccc

SEQ ID NO: 97912 - RNA, 22 nt, Artificial Sequence
  LRRK2 RNA guide
ucaaaaaggugaagaccuuccu

SEQ ID NO: 97913 - RNA, 22 nt, Artificial Sequence
  LRRK2 RNA guide
ucaaacccggacucuuaaggag

SEQ ID NO: 97914 - RNA, 22 nt, Artificial Sequence
  LRRK2 RNA guide
ucaacuucuucagaguuuccuc

SEQ ID NO: 97915 - RNA, 22 nt, Artificial Sequence
  LRRK2 RNA guide
ucaaggggaggaggacaaaauu

SEQ ID NO: 97916 - RNA, 22 nt, Artificial Sequence
  LRRK2 RNA guide
ucaagugauuaccgcgcucgga

SEQ ID NO: 97917 - RNA, 22 nt, Artificial Sequence
  LRRK2 RNA guide
ucaccuuuuugacuuuucuccc

SEQ ID NO: 97918 - RNA, 22 nt, Artificial Sequence
  LRRK2 RNA guide
ucacguacuccgagcgcgguaa

SEQ ID NO: 97919 - RNA, 22 nt, Artificial Sequence
  LRRK2 RNA guide
ucagaguuuccucguccucuuc

SEQ ID NO: 97920 - RNA, 22 nt, Artificial Sequence
  LRRK2 RNA guide
ucagccugacuaucaacuucuu

SEQ ID NO: 97921 - RNA, 22 nt, Artificial Sequence
  LRRK2 RNA guide
ucagcucaccgcccgcagccag

SEQ ID NO: 97922 - RNA, 22 nt, Artificial Sequence
  LRRK2 RNA guide
ucagcugcuuucugcccuaagg

SEQ ID NO: 97923 - RNA, 22 nt, Artificial Sequence
  LRRK2 RNA guide
ucaggaaggucuucaccuuuuu

SEQ ID NO: 97924 - RNA, 22 nt, Artificial Sequence
  LRRK2 RNA guide
ucaggcugaacaauguccagga

SEQ ID NO: 97925 - RNA, 22 nt, Artificial Sequence
  LRRK2 RNA guide
ucaggggugcgaagaggacgag

SEQ ID NO: 97926 - RNA, 22 nt, Artificial Sequence
  LRRK2 RNA guide
ucaugcugggagggcggcgggu

SEQ ID NO: 97927 - RNA, 22 nt, Artificial Sequence
  LRRK2 RNA guide
uccaaauccuggaggaucugcu

SEQ ID NO: 97928 - RNA, 22 nt, Artificial Sequence
  LRRK2 RNA guide
uccaacccgccgcccucccagc

SEQ ID NO: 97929 - RNA, 22 nt, Artificial Sequence
  LRRK2 RNA guide
uccaggauuuggaccagcguuu

SEQ ID NO: 97930 - RNA, 22 nt, Artificial Sequence
  LRRK2 RNA guide
ucccagcaugaacguccgcugc

SEQ ID NO: 97931 - RNA, 22 nt, Artificial Sequence
  LRRK2 RNA guide
ucccauauccuuuccuuagggc

SEQ ID NO: 97932 - RNA, 22 nt, Artificial Sequence
  LRRK2 RNA guide
ucccccuccuuacauuugcaaa

SEQ ID NO: 97933 - RNA, 22 nt, Artificial Sequence
  LRRK2 RNA guide
uccccgggggcgagcucagcuc

SEQ ID NO: 97934 - RNA, 22 nt, Artificial Sequence
  LRRK2 RNA guide
uccccuugacccugcucaaacc

SEQ ID NO: 97935 - RNA, 22 nt, Artificial Sequence
  LRRK2 RNA guide
ucccugagcagcggacguucau

SEQ ID NO: 97936 - RNA, 22 nt, Artificial Sequence
  LRRK2 RNA guide
uccgagcgcgguaaucacuuga

SEQ ID NO: 97937 - RNA, 22 nt, Artificial Sequence
  LRRK2 RNA guide
uccgcugcucagggaaccggca

SEQ ID NO: 97938 - RNA, 22 nt, Artificial Sequence
  LRRK2 RNA guide
uccggguuugagcagggucaag

SEQ ID NO: 97939 - RNA, 22 nt, Artificial Sequence
  LRRK2 RNA guide
uccuccaggauuuggaccagcg

SEQ ID NO: 97940 - RNA, 22 nt, Artificial Sequence
  LRRK2 RNA guide
uccuccccuugacccugcucaa

SEQ ID NO: 97941 - RNA, 22 nt, Artificial Sequence
  LRRK2 RNA guide
uccuccuccccuugacccugcu

SEQ ID NO: 97942 - RNA, 22 nt, Artificial Sequence
  LRRK2 RNA guide
uccucguccucuucgcaccccu

SEQ ID NO: 97943 - RNA, 22 nt, Artificial Sequence
  LRRK2 RNA guide
uccucuucgcaccccugacagc

SEQ ID NO: 97944 - RNA, 22 nt, Artificial Sequence
  LRRK2 RNA guide
uccugaaauucucagcugcuuu

SEQ ID NO: 97945 - RNA, 22 nt, Artificial Sequence
  LRRK2 RNA guide
uccuggacauuguucagccuga

SEQ ID NO: 97946 - RNA, 22 nt, Artificial Sequence
  LRRK2 RNA guide
uccuggaggaucugcugguguu

SEQ ID NO: 97947 - RNA, 22 nt, Artificial Sequence
  LRRK2 RNA guide
uccuuaagaguccggguuugag

SEQ ID NO: 97948 - RNA, 22 nt, Artificial Sequence
  LRRK2 RNA guide
uccuuacauuugcaaauuuugu

SEQ ID NO: 97949 - RNA, 22 nt, Artificial Sequence
  LRRK2 RNA guide
uccuuagggcagaaagcagcug

SEQ ID NO: 97950 - RNA, 22 nt, Artificial Sequence
  LRRK2 RNA guide
uccuuccuggacauuguucagc

SEQ ID NO: 97951 - RNA, 22 nt, Artificial Sequence
  LRRK2 RNA guide
uccuuuccuuagggcagaaagc

SEQ ID NO: 97952 - RNA, 22 nt, Artificial Sequence
  LRRK2 RNA guide
ucgcaccccugacagcugccac

SEQ ID NO: 97953 - RNA, 22 nt, Artificial Sequence
  LRRK2 RNA guide
ucggaguacgugaacaccagca

SEQ ID NO: 97954 - RNA, 22 nt, Artificial Sequence
  LRRK2 RNA guide
ucguccucuucgcaccccugac

SEQ ID NO: 97955 - RNA, 22 nt, Artificial Sequence
  LRRK2 RNA guide
ucuaucuguuuuccuuccugga

SEQ ID NO: 97956 - RNA, 22 nt, Artificial Sequence
  LRRK2 RNA guide
ucucagcugcuuucugcccuaa

SEQ ID NO: 97957 - RNA, 22 nt, Artificial Sequence
  LRRK2 RNA guide
ucucccccuccuuacauuugca

SEQ ID NO: 97958 - RNA, 22 nt, Artificial Sequence
  LRRK2 RNA guide
ucugaaacggggagaaaaguca

SEQ ID NO: 97959 - RNA, 22 nt, Artificial Sequence
  LRRK2 RNA guide
ucugaagaaguugauagucagg

SEQ ID NO: 97960 - RNA, 22 nt, Artificial Sequence
  LRRK2 RNA guide
ucugcccuaaggaaaggauaug

SEQ ID NO: 97961 - RNA, 22 nt, Artificial Sequence
  LRRK2 RNA guide
ucugcugguguucacguacucc

SEQ ID NO: 97962 - RNA, 22 nt, Artificial Sequence
  LRRK2 RNA guide
ucuguuuuccuuccuggacauu

SEQ ID NO: 97963 - RNA, 22 nt, Artificial Sequence
  LRRK2 RNA guide
ucuuaaggagccgcaaacuccc

SEQ ID NO: 97964 - RNA, 22 nt, Artificial Sequence
  LRRK2 RNA guide
ucuucaccuuuuugacuuuucu

SEQ ID NO: 97965 - RNA, 22 nt, Artificial Sequence
  LRRK2 RNA guide
ucuucgcaccccugacagcugc

SEQ ID NO: 97966 - RNA, 22 nt, Artificial Sequence
  LRRK2 RNA guide
ugaaacggggagaaaagucaaa

SEQ ID NO: 97967 - RNA, 22 nt, Artificial Sequence
  LRRK2 RNA guide
ugaaauucucagcugcuuucug

SEQ ID NO: 97968 - RNA, 22 nt, Artificial Sequence
  LRRK2 RNA guide
ugaacaauguccaggaaggaaa

SEQ ID NO: 97969 - RNA, 22 nt, Artificial Sequence
  LRRK2 RNA guide
ugaacaccagcagauccuccag

SEQ ID NO: 97970 - RNA, 22 nt, Artificial Sequence
  LRRK2 RNA guide
ugaacguccgcugcucagggaa

SEQ ID NO: 97971 - RNA, 22 nt, Artificial Sequence
  LRRK2 RNA guide
ugaagaaguugauagucaggcu

SEQ ID NO: 97972 - RNA, 22 nt, Artificial Sequence
  LRRK2 RNA guide
ugaagaccuuccugaaauucuc

SEQ ID NO: 97973 - RNA, 22 nt, Artificial Sequence
  LRRK2 RNA guide
ugacagcugccacuagccaugg

SEQ ID NO: 97974 - RNA, 22 nt, Artificial Sequence
  LRRK2 RNA guide
ugacccugcucaaacccggacu

SEQ ID NO: 97975 - RNA, 22 nt, Artificial Sequence
  LRRK2 RNA guide
ugacuaucaacuucuucagagu

SEQ ID NO: 97976 - RNA, 22 nt, Artificial Sequence
  LRRK2 RNA guide
ugacuuuucuccccguuucaga

SEQ ID NO: 97977 - RNA, 22 nt, Artificial Sequence
  LRRK2 RNA guide
ugagaauuucaggaaggucuuc

SEQ ID NO: 97978 - RNA, 22 nt, Artificial Sequence
  LRRK2 RNA guide
ugagcagcggacguucaugcug

SEQ ID NO: 97979 - RNA, 22 nt, Artificial Sequence
  LRRK2 RNA guide
ugagcagggucaaggggaggag

SEQ ID NO: 97980 - RNA, 22 nt, Artificial Sequence
  LRRK2 RNA guide
ugagcugagcucgcccccgggg

SEQ ID NO: 97981 - RNA, 22 nt, Artificial Sequence
  LRRK2 RNA guide
ugauagucaggcugaacaaugu

SEQ ID NO: 97982 - RNA, 22 nt, Artificial Sequence
  LRRK2 RNA guide
ugauuaccgcgcucggaguacg

SEQ ID NO: 97983 - RNA, 22 nt, Artificial Sequence
  LRRK2 RNA guide
ugcaaacuuucucccccuccuu

SEQ ID NO: 97984 - RNA, 22 nt, Artificial Sequence
  LRRK2 RNA guide
ugcaaauguaaggagggggaga

SEQ ID NO: 97985 - RNA, 22 nt, Artificial Sequence
  LRRK2 RNA guide
ugcaaauuuuguccuccucccc

SEQ ID NO: 97986 - RNA, 22 nt, Artificial Sequence
  LRRK2 RNA guide
ugccaccauggcuaguggcagc

SEQ ID NO: 97987 - RNA, 22 nt, Artificial Sequence
  LRRK2 RNA guide
ugccacuagccaugguggcacc

SEQ ID NO: 97988 - RNA, 22 nt, Artificial Sequence
  LRRK2 RNA guide
ugcccuaaggaaaggauauggg

SEQ ID NO: 97989 - RNA, 22 nt, Artificial Sequence
  LRRK2 RNA guide
ugccgguucccugagcagcgga

SEQ ID NO: 97990 - RNA, 22 nt, Artificial Sequence
  LRRK2 RNA guide
ugcgaagaggacgaggaaacuc

SEQ ID NO: 97991 - RNA, 22 nt, Artificial Sequence
  LRRK2 RNA guide
ugcggcuccuuaagaguccggg

SEQ ID NO: 97992 - RNA, 22 nt, Artificial Sequence
  LRRK2 RNA guide
ugcucaaacccggacucuuaag

SEQ ID NO: 97993 - RNA, 22 nt, Artificial Sequence
  LRRK2 RNA guide
ugcugggagggcggcggguugg

SEQ ID NO: 97994 - RNA, 22 nt, Artificial Sequence
  LRRK2 RNA guide
ugcugguguucacguacuccga

SEQ ID NO: 97995 - RNA, 22 nt, Artificial Sequence
  LRRK2 RNA guide
ugcuuccaacccgccgcccucc

SEQ ID NO: 97996 - RNA, 22 nt, Artificial Sequence
  LRRK2 RNA guide
ugcuuucugcccuaaggaaagg

SEQ ID NO: 97997 - RNA, 22 nt, Artificial Sequence
  LRRK2 RNA guide
ugcuuuuauuuuugcaaacuuu

SEQ ID NO: 97998 - RNA, 22 nt, Artificial Sequence
  LRRK2 RNA guide
uggaagcaggugccaccauggc

SEQ ID NO: 97999 - RNA, 22 nt, Artificial Sequence
  LRRK2 RNA guide
uggacauuguucagccugacua

SEQ ID NO: 98000 - RNA, 22 nt, Artificial Sequence
  LRRK2 RNA guide
uggaccagcguuucuaucuguu

SEQ ID NO: 98001 - RNA, 22 nt, Artificial Sequence
  LRRK2 RNA guide
uggaggaucugcugguguucac

SEQ ID NO: 98002 - RNA, 22 nt, Artificial Sequence
  LRRK2 RNA guide
uggcaccugcuuccaacccgcc

SEQ ID NO: 98003 - RNA, 22 nt, Artificial Sequence
  LRRK2 RNA guide
uggcagcugucaggggugcgaa

SEQ ID NO: 98004 - RNA, 22 nt, Artificial Sequence
  LRRK2 RNA guide
uggccggcgccccugccgguuc

SEQ ID NO: 98005 - RNA, 22 nt, Artificial Sequence
  LRRK2 RNA guide
ugggagggcggcggguuggaag

SEQ ID NO: 98006 - RNA, 22 nt, Artificial Sequence
  LRRK2 RNA guide
ugggaguuugcggcuccuuaag

SEQ ID NO: 98007 - RNA, 22 nt, Artificial Sequence
  LRRK2 RNA guide
ugguccaaauccuggaggaucu

SEQ ID NO: 98008 - RNA, 22 nt, Artificial Sequence
  LRRK2 RNA guide
ugguggcaccugcuuccaaccc

SEQ ID NO: 98009 - RNA, 22 nt, Artificial Sequence
  LRRK2 RNA guide
ugguguucacguacuccgagcg

SEQ ID NO: 98010 - RNA, 22 nt, Artificial Sequence
  LRRK2 RNA guide
uguaaggagggggagaaaguuu

SEQ ID NO: 98011 - RNA, 22 nt, Artificial Sequence
  LRRK2 RNA guide
ugucaggggugcgaagaggacg

SEQ ID NO: 98012 - RNA, 22 nt, Artificial Sequence
  LRRK2 RNA guide
uguccaggaaggaaaacagaua

SEQ ID NO: 98013 - RNA, 22 nt, Artificial Sequence
  LRRK2 RNA guide
uguccuccuccccuugacccug

SEQ ID NO: 98014 - RNA, 22 nt, Artificial Sequence
  LRRK2 RNA guide
uguggccggcgccccugccggu

SEQ ID NO: 98015 - RNA, 22 nt, Artificial Sequence
  LRRK2 RNA guide
uguucacguacuccgagcgcgg

SEQ ID NO: 98016 - RNA, 22 nt, Artificial Sequence
  LRRK2 RNA guide
uguucagccugacuaucaacuu

SEQ ID NO: 98017 - RNA, 22 nt, Artificial Sequence
  LRRK2 RNA guide
uguuuuccuuccuggacauugu

SEQ ID NO: 98018 - RNA, 22 nt, Artificial Sequence
  LRRK2 RNA guide
uuaaggagccgcaaacucccau

SEQ ID NO: 98019 - RNA, 22 nt, Artificial Sequence
  LRRK2 RNA guide
uuacauuugcaaauuuuguccu

SEQ ID NO: 98020 - RNA, 22 nt, Artificial Sequence
  LRRK2 RNA guide
uuaccgcgcucggaguacguga

SEQ ID NO: 98021 - RNA, 22 nt, Artificial Sequence
  LRRK2 RNA guide
uuagggcagaaagcagcugaga

SEQ ID NO: 98022 - RNA, 22 nt, Artificial Sequence
  LRRK2 RNA guide
uuagucugaaacggggagaaaa

SEQ ID NO: 98023 - RNA, 22 nt, Artificial Sequence
  LRRK2 RNA guide
uuauuuucaagugauuaccgcg

SEQ ID NO: 98024 - RNA, 22 nt, Artificial Sequence
  LRRK2 RNA guide
uuauuuuugcaaacuuucuccc

SEQ ID NO: 98025 - RNA, 22 nt, Artificial Sequence
  LRRK2 RNA guide
uucaagugauuaccgcgcucgg

SEQ ID NO: 98026 - RNA, 22 nt, Artificial Sequence
  LRRK2 RNA guide
uucaccuuuuugacuuuucucc

SEQ ID NO: 98027 - RNA, 22 nt, Artificial Sequence
  LRRK2 RNA guide
uucacguacuccgagcgcggua

SEQ ID NO: 98028 - RNA, 22 nt, Artificial Sequence
  LRRK2 RNA guide
uucagccugacuaucaacuucu

SEQ ID NO: 98029 - RNA, 22 nt, Artificial Sequence
  LRRK2 RNA guide
uucaggaaggucuucaccuuuu

SEQ ID NO: 98030 - RNA, 22 nt, Artificial Sequence
  LRRK2 RNA guide
uucaugcugggagggcggcggg

SEQ ID NO: 98031 - RNA, 22 nt, Artificial Sequence
  LRRK2 RNA guide
uuccaacccgccgcccucccag

SEQ ID NO: 98032 - RNA, 22 nt, Artificial Sequence
  LRRK2 RNA guide
uucccugagcagcggacguuca

SEQ ID NO: 98033 - RNA, 22 nt, Artificial Sequence
  LRRK2 RNA guide
uuccucguccucuucgcacccc

SEQ ID NO: 98034 - RNA, 22 nt, Artificial Sequence
  LRRK2 RNA guide
uuccugaaauucucagcugcuu

SEQ ID NO: 98035 - RNA, 22 nt, Artificial Sequence
  LRRK2 RNA guide
uuccuggacauuguucagccug

SEQ ID NO: 98036 - RNA, 22 nt, Artificial Sequence
  LRRK2 RNA guide
uuccuuagggcagaaagcagcu

SEQ ID NO: 98037 - RNA, 22 nt, Artificial Sequence
  LRRK2 RNA guide
uuccuuccuggacauuguucag

SEQ ID NO: 98038 - RNA, 22 nt, Artificial Sequence
  LRRK2 RNA guide
uucgcaccccugacagcugcca

SEQ ID NO: 98039 - RNA, 22 nt, Artificial Sequence
  LRRK2 RNA guide
uucuaucuguuuuccuuccugg

SEQ ID NO: 98040 - RNA, 22 nt, Artificial Sequence
  LRRK2 RNA guide
uucucagcugcuuucugcccua

SEQ ID NO: 98041 - RNA, 22 nt, Artificial Sequence
  LRRK2 RNA guide
uucucccccuccuuacauuugc

SEQ ID NO: 98042 - RNA, 22 nt, Artificial Sequence
  LRRK2 RNA guide
uucugcccuaaggaaaggauau

SEQ ID NO: 98043 - RNA, 22 nt, Artificial Sequence
  LRRK2 RNA guide
uugacccugcucaaacccggac

SEQ ID NO: 98044 - RNA, 22 nt, Artificial Sequence
  LRRK2 RNA guide
uugacuuuucuccccguuucag

SEQ ID NO: 98045 - RNA, 22 nt, Artificial Sequence
  LRRK2 RNA guide
uugagcagggucaaggggagga

SEQ ID NO: 98046 - RNA, 22 nt, Artificial Sequence
  LRRK2 RNA guide
uugauagucaggcugaacaaug

SEQ ID NO: 98047 - RNA, 22 nt, Artificial Sequence
  LRRK2 RNA guide
uugcaaacuuucucccccuccu

SEQ ID NO: 98048 - RNA, 22 nt, Artificial Sequence
  LRRK2 RNA guide
uugcaaauguaaggagggggag

SEQ ID NO: 98049 - RNA, 22 nt, Artificial Sequence
  LRRK2 RNA guide
uugcaaauuuuguccuccuccc

SEQ ID NO: 98050 - RNA, 22 nt, Artificial Sequence
  LRRK2 RNA guide
uugcggcuccuuaagaguccgg

SEQ ID NO: 98051 - RNA, 22 nt, Artificial Sequence
  LRRK2 RNA guide
uuggaagcaggugccaccaugg

SEQ ID NO: 98052 - RNA, 22 nt, Artificial Sequence
  LRRK2 RNA guide
uuggaccagcguuucuaucugu

SEQ ID NO: 98053 - RNA, 22 nt, Artificial Sequence
  LRRK2 RNA guide
uuguccuccuccccuugacccu

SEQ ID NO: 98054 - RNA, 22 nt, Artificial Sequence
  LRRK2 RNA guide
uuguucagccugacuaucaacu

SEQ ID NO: 98055 - RNA, 22 nt, Artificial Sequence
  LRRK2 RNA guide
uuuagucugaaacggggagaaa

SEQ ID NO: 98056 - RNA, 22 nt, Artificial Sequence
  LRRK2 RNA guide
uuuauuuucaagugauuaccgc

SEQ ID NO: 98057 - RNA, 22 nt, Artificial Sequence
  LRRK2 RNA guide
uuuauuuuugcaaacuuucucc

SEQ ID NO: 98058 - RNA, 22 nt, Artificial Sequence
  LRRK2 RNA guide
uuucaagugauuaccgcgcucg

SEQ ID NO: 98059 - RNA, 22 nt, Artificial Sequence
  LRRK2 RNA guide
uuucaggaaggucuucaccuuu

SEQ ID NO: 98060 - RNA, 22 nt, Artificial Sequence
  LRRK2 RNA guide
uuuccucguccucuucgcaccc

SEQ ID NO: 98061 - RNA, 22 nt, Artificial Sequence
  LRRK2 RNA guide
uuuccuuagggcagaaagcagc

SEQ ID NO: 98062 - RNA, 22 nt, Artificial Sequence
  LRRK2 RNA guide
uuuccuuccuggacauuguuca

SEQ ID NO: 98063 - RNA, 22 nt, Artificial Sequence
  LRRK2 RNA guide
uuucuaucuguuuuccuuccug

SEQ ID NO: 98064 - RNA, 22 nt, Artificial Sequence
  LRRK2 RNA guide
uuucucccccuccuuacauuug

SEQ ID NO: 98065 - RNA, 22 nt, Artificial Sequence
  LRRK2 RNA guide
uuucugcccuaaggaaaggaua

SEQ ID NO: 98066 - RNA, 22 nt, Artificial Sequence
  LRRK2 RNA guide
uuugacuuuucuccccguuuca

SEQ ID NO: 98067 - RNA, 22 nt, Artificial Sequence
  LRRK2 RNA guide
uuugagcagggucaaggggagg

SEQ ID NO: 98068 - RNA, 22 nt, Artificial Sequence
  LRRK2 RNA guide
uuugcaaacuuucucccccucc

SEQ ID NO: 98069 - RNA, 22 nt, Artificial Sequence
  LRRK2 RNA guide
uuugcaaauguaaggaggggga

SEQ ID NO: 98070 - RNA, 22 nt, Artificial Sequence
  LRRK2 RNA guide
uuugcaaauuuuguccuccucc

SEQ ID NO: 98071 - RNA, 22 nt, Artificial Sequence
  LRRK2 RNA guide
uuugcggcuccuuaagaguccg

SEQ ID NO: 98072 - RNA, 22 nt, Artificial Sequence
  LRRK2 RNA guide
uuuggaccagcguuucuaucug

SEQ ID NO: 98073 - RNA, 22 nt, Artificial Sequence
  LRRK2 RNA guide
uuuguccuccuccccuugaccc

SEQ ID NO: 98074 - RNA, 22 nt, Artificial Sequence
  LRRK2 RNA guide
uuuuagucugaaacggggagaa

SEQ ID NO: 98075 - RNA, 22 nt, Artificial Sequence
  LRRK2 RNA guide
uuuuauuuuugcaaacuuucuc

SEQ ID NO: 98076 - RNA, 22 nt, Artificial Sequence
  LRRK2 RNA guide
uuuucaagugauuaccgcgcuc

SEQ ID NO: 98077 - RNA, 22 nt, Artificial Sequence
  LRRK2 RNA guide
uuuuccuuccuggacauuguuc

SEQ ID NO: 98078 - RNA, 22 nt, Artificial Sequence
  LRRK2 RNA guide
uuuugacuuuucuccccguuuc

SEQ ID NO: 98079 - RNA, 22 nt, Artificial Sequence
  LRRK2 RNA guide
uuuugcaaacuuucucccccuc

SEQ ID NO: 98080 - RNA, 22 nt, Artificial Sequence
  LRRK2 RNA guide
uuuuguccuccuccccuugacc

SEQ ID NO: 98081 - RNA, 22 nt, Artificial Sequence
  LRRK2 RNA guide
uuuuuagucugaaacggggaga

SEQ ID NO: 98082 - RNA, 22 nt, Artificial Sequence
  LRRK2 RNA guide
uuuuugacuuuucuccccguuu

SEQ ID NO: 98083 - RNA, 22 nt, Artificial Sequence
  LRRK2 RNA guide
uuuuugcaaacuuucucccccu

SEQ ID NO: 98084 - RNA, 20 nt, Artificial Sequence
  LRRK2 RNA guide
aaaaaggagagggggugcug

SEQ ID NO: 98085 - RNA, 20 nt, Artificial Sequence
  LRRK2 RNA guide
aaaacaaguggguggggaaa

SEQ ID NO: 98086 - RNA, 20 nt, Artificial Sequence
  LRRK2 RNA guide
aaaagaagcaaagucacaau

SEQ ID NO: 98087 - RNA, 20 nt, Artificial Sequence
  LRRK2 RNA guide
aaaaggagagggggugcugu

SEQ ID NO: 98088 - RNA, 20 nt, Artificial Sequence
  LRRK2 RNA guide
aaacaaguggguggggaaaa

SEQ ID NO: 98089 - RNA, 20 nt, Artificial Sequence
  LRRK2 RNA guide
aaagaagcaaagucacaauc

SEQ ID NO: 98090 - RNA, 20 nt, Artificial Sequence
  LRRK2 RNA guide
aaaggagagggggugcugug

SEQ ID NO: 98091 - RNA, 20 nt, Artificial Sequence
  LRRK2 RNA guide
aaagucacaauccacagcac

SEQ ID NO: 98092 - RNA, 20 nt, Artificial Sequence
  LRRK2 RNA guide
aacaaguggguggggaaaag

SEQ ID NO: 98093 - RNA, 20 nt, Artificial Sequence
  LRRK2 RNA guide
aagaagcaaagucacaaucc

SEQ ID NO: 98094 - RNA, 20 nt, Artificial Sequence
  LRRK2 RNA guide
aagcaaagucacaauccaca

SEQ ID NO: 98095 - RNA, 20 nt, Artificial Sequence
  LRRK2 RNA guide
aaggagagggggugcugugg

SEQ ID NO: 98096 - RNA, 20 nt, Artificial Sequence
  LRRK2 RNA guide
aagucacaauccacagcacc

SEQ ID NO: 98097 - RNA, 20 nt, Artificial Sequence
  LRRK2 RNA guide
aaguggguggggaaaagaag

SEQ ID NO: 98098 - RNA, 20 nt, Artificial Sequence
  LRRK2 RNA guide
aauccacagcacccccucuc

SEQ ID NO: 98099 - RNA, 20 nt, Artificial Sequence
  LRRK2 RNA guide
acaaguggguggggaaaaga

SEQ ID NO: 98100 - RNA, 20 nt, Artificial Sequence
  LRRK2 RNA guide
acaauccacagcacccccuc

SEQ ID NO: 98101 - RNA, 20 nt, Artificial Sequence
  LRRK2 RNA guide
acagcacccccucuccuuuu

SEQ ID NO: 98102 - RNA, 20 nt, Artificial Sequence
  LRRK2 RNA guide
acccccucuccuuuuuaguc

SEQ ID NO: 98103 - RNA, 20 nt, Artificial Sequence
  LRRK2 RNA guide
acuaaaaaggagagggggug

SEQ ID NO: 98104 - RNA, 20 nt, Artificial Sequence
  LRRK2 RNA guide
acuuugcuucuuuuccccac

SEQ ID NO: 98105 - RNA, 20 nt, Artificial Sequence
  LRRK2 RNA guide
agaagcaaagucacaaucca

SEQ ID NO: 98106 - RNA, 20 nt, Artificial Sequence
  LRRK2 RNA guide
agacuaaaaaggagaggggg

SEQ ID NO: 98107 - RNA, 20 nt, Artificial Sequence
  LRRK2 RNA guide
agagggggugcuguggauug

SEQ ID NO: 98108 - RNA, 20 nt, Artificial Sequence
  LRRK2 RNA guide
agcaaagucacaauccacag

SEQ ID NO: 98109 - RNA, 20 nt, Artificial Sequence
  LRRK2 RNA guide
agcacccccucuccuuuuua

SEQ ID NO: 98110 - RNA, 20 nt, Artificial Sequence
  LRRK2 RNA guide
aggagagggggugcugugga

SEQ ID NO: 98111 - RNA, 20 nt, Artificial Sequence
  LRRK2 RNA guide
agggggugcuguggauugug

SEQ ID NO: 98112 - RNA, 20 nt, Artificial Sequence
  LRRK2 RNA guide
agucacaauccacagcaccc

SEQ ID NO: 98113 - RNA, 20 nt, Artificial Sequence
  LRRK2 RNA guide
aguggguggggaaaagaagc

SEQ ID NO: 98114 - RNA, 20 nt, Artificial Sequence
  LRRK2 RNA guide
auccacagcacccccucucc

SEQ ID NO: 98115 - RNA, 20 nt, Artificial Sequence
  LRRK2 RNA guide
auugugacuuugcuucuuuu

SEQ ID NO: 98116 - RNA, 20 nt, Artificial Sequence
  LRRK2 RNA guide
caaagucacaauccacagca

SEQ ID NO: 98117 - RNA, 20 nt, Artificial Sequence
  LRRK2 RNA guide
caaguggguggggaaaagaa

SEQ ID NO: 98118 - RNA, 20 nt, Artificial Sequence
  LRRK2 RNA guide
caauccacagcacccccucu

SEQ ID NO: 98119 - RNA, 20 nt, Artificial Sequence
  LRRK2 RNA guide
cacaauccacagcacccccu

SEQ ID NO: 98120 - RNA, 20 nt, Artificial Sequence
  LRRK2 RNA guide
cacagcacccccucuccuuu

SEQ ID NO: 98121 - RNA, 20 nt, Artificial Sequence
  LRRK2 RNA guide
cacccccucuccuuuuuagu

SEQ ID NO: 98122 - RNA, 20 nt, Artificial Sequence
  LRRK2 RNA guide
cagacuaaaaaggagagggg

SEQ ID NO: 98123 - RNA, 20 nt, Artificial Sequence
  LRRK2 RNA guide
cagcacccccucuccuuuuu

SEQ ID NO: 98124 - RNA, 20 nt, Artificial Sequence
  LRRK2 RNA guide
ccacagcacccccucuccuu

SEQ ID NO: 98125 - RNA, 20 nt, Artificial Sequence
  LRRK2 RNA guide
cccccucuccuuuuuagucu

SEQ ID NO: 98126 - RNA, 20 nt, Artificial Sequence
  LRRK2 RNA guide
ccccguuucagacuaaaaag

SEQ ID NO: 98127 - RNA, 20 nt, Artificial Sequence
  LRRK2 RNA guide
ccccucuccuuuuuagucug

SEQ ID NO: 98128 - RNA, 20 nt, Artificial Sequence
  LRRK2 RNA guide
cccguuucagacuaaaaagg

SEQ ID NO: 98129 - RNA, 20 nt, Artificial Sequence
  LRRK2 RNA guide
cccucuccuuuuuagucuga

SEQ ID NO: 98130 - RNA, 20 nt, Artificial Sequence
  LRRK2 RNA guide
ccguuucagacuaaaaagga

SEQ ID NO: 98131 - RNA, 20 nt, Artificial Sequence
  LRRK2 RNA guide
ccucuccuuuuuagucugaa

SEQ ID NO: 98132 - RNA, 20 nt, Artificial Sequence
  LRRK2 RNA guide
ccuuuuuagucugaaacggg

SEQ ID NO: 98133 - RNA, 20 nt, Artificial Sequence
  LRRK2 RNA guide
cguuucagacuaaaaaggag

SEQ ID NO: 98134 - RNA, 20 nt, Artificial Sequence
  LRRK2 RNA guide
cuaaaaaggagagggggugc

SEQ ID NO: 98135 - RNA, 20 nt, Artificial Sequence
  LRRK2 RNA guide
cuccccguuucagacuaaaa

SEQ ID NO: 98136 - RNA, 20 nt, Artificial Sequence
  LRRK2 RNA guide
cuccuuuuuagucugaaacg

SEQ ID NO: 98137 - RNA, 20 nt, Artificial Sequence
  LRRK2 RNA guide
cucuccuuuuuagucugaaa

SEQ ID NO: 98138 - RNA, 20 nt, Artificial Sequence
  LRRK2 RNA guide
cuggaaaacaaguggguggg

SEQ ID NO: 98139 - RNA, 20 nt, Artificial Sequence
  LRRK2 RNA guide
cuguggauugugacuuugcu

SEQ ID NO: 98140 - RNA, 20 nt, Artificial Sequence
  LRRK2 RNA guide
cuucuuuuccccacccacuu

SEQ ID NO: 98141 - RNA, 20 nt, Artificial Sequence
  LRRK2 RNA guide
cuuugcuucuuuuccccacc

SEQ ID NO: 98142 - RNA, 20 nt, Artificial Sequence
  LRRK2 RNA guide
cuuuuccccacccacuuguu

SEQ ID NO: 98143 - RNA, 20 nt, Artificial Sequence
  LRRK2 RNA guide
gaaaacaaguggguggggaa

SEQ ID NO: 98144 - RNA, 20 nt, Artificial Sequence
  LRRK2 RNA guide
gaaaagaagcaaagucacaa

SEQ ID NO: 98145 - RNA, 20 nt, Artificial Sequence
  LRRK2 RNA guide
gaagcaaagucacaauccac

SEQ ID NO: 98146 - RNA, 20 nt, Artificial Sequence
  LRRK2 RNA guide
gacuaaaaaggagagggggu

SEQ ID NO: 98147 - RNA, 20 nt, Artificial Sequence
  LRRK2 RNA guide
gacuuugcuucuuuucccca

SEQ ID NO: 98148 - RNA, 20 nt, Artificial Sequence
  LRRK2 RNA guide
gagagggggugcuguggauu

SEQ ID NO: 98149 - RNA, 20 nt, Artificial Sequence
  LRRK2 RNA guide
gagggggugcuguggauugu

SEQ ID NO: 98150 - RNA, 20 nt, Artificial Sequence
  LRRK2 RNA guide
gauugugacuuugcuucuuu

SEQ ID NO: 98151 - RNA, 20 nt, Artificial Sequence
  LRRK2 RNA guide
gcaaagucacaauccacagc

SEQ ID NO: 98152 - RNA, 20 nt, Artificial Sequence
  LRRK2 RNA guide
gcacccccucuccuuuuuag

SEQ ID NO: 98153 - RNA, 20 nt, Artificial Sequence
  LRRK2 RNA guide
gcuguggauugugacuuugc

SEQ ID NO: 98154 - RNA, 20 nt, Artificial Sequence
  LRRK2 RNA guide
gcuucuuuuccccacccacu

SEQ ID NO: 98155 - RNA, 20 nt, Artificial Sequence
  LRRK2 RNA guide
ggaaaacaagugggugggga

SEQ ID NO: 98156 - RNA, 20 nt, Artificial Sequence
  LRRK2 RNA guide
ggaaaagaagcaaagucaca

SEQ ID NO: 98157 - RNA, 20 nt, Artificial Sequence
  LRRK2 RNA guide
ggagagggggugcuguggau

SEQ ID NO: 98158 - RNA, 20 nt, Artificial Sequence
  LRRK2 RNA guide
ggauugugacuuugcuucuu

SEQ ID NO: 98159 - RNA, 20 nt, Artificial Sequence
  LRRK2 RNA guide
gggaaaagaagcaaagucac

SEQ ID NO: 98160 - RNA, 20 nt, Artificial Sequence
  LRRK2 RNA guide
ggggaaaagaagcaaaguca

SEQ ID NO: 98161 - RNA, 20 nt, Artificial Sequence
  LRRK2 RNA guide
gggggugcuguggauuguga

SEQ ID NO: 98162 - RNA, 20 nt, Artificial Sequence
  LRRK2 RNA guide
ggggugcuguggauugugac

SEQ ID NO: 98163 - RNA, 20 nt, Artificial Sequence
  LRRK2 RNA guide
gggugcuguggauugugacu

SEQ ID NO: 98164 - RNA, 20 nt, Artificial Sequence
  LRRK2 RNA guide
ggguggggaaaagaagcaaa

SEQ ID NO: 98165 - RNA, 20 nt, Artificial Sequence
  LRRK2 RNA guide
ggugcuguggauugugacuu

SEQ ID NO: 98166 - RNA, 20 nt, Artificial Sequence
  LRRK2 RNA guide
gguggggaaaagaagcaaag

SEQ ID NO: 98167 - RNA, 20 nt, Artificial Sequence
  LRRK2 RNA guide
gucacaauccacagcacccc

SEQ ID NO: 98168 - RNA, 20 nt, Artificial Sequence
  LRRK2 RNA guide
gugacuuugcuucuuuuccc

SEQ ID NO: 98169 - RNA, 20 nt, Artificial Sequence
  LRRK2 RNA guide
gugcuguggauugugacuuu

SEQ ID NO: 98170 - RNA, 20 nt, Artificial Sequence
  LRRK2 RNA guide
guggauugugacuuugcuuc

SEQ ID NO: 98171 - RNA, 20 nt, Artificial Sequence
  LRRK2 RNA guide
guggggaaaagaagcaaagu

SEQ ID NO: 98172 - RNA, 20 nt, Artificial Sequence
  LRRK2 RNA guide
guggguggggaaaagaagca

SEQ ID NO: 98173 - RNA, 20 nt, Artificial Sequence
  LRRK2 RNA guide
guuucagacuaaaaaggaga

SEQ ID NO: 98174 - RNA, 20 nt, Artificial Sequence
  LRRK2 RNA guide
uaaaaaggagagggggugcu

SEQ ID NO: 98175 - RNA, 20 nt, Artificial Sequence
  LRRK2 RNA guide
ucacaauccacagcaccccc

SEQ ID NO: 98176 - RNA, 20 nt, Artificial Sequence
  LRRK2 RNA guide
ucagacuaaaaaggagaggg

SEQ ID NO: 98177 - RNA, 20 nt, Artificial Sequence
  LRRK2 RNA guide
uccacagcacccccucuccu

SEQ ID NO: 98178 - RNA, 20 nt, Artificial Sequence
  LRRK2 RNA guide
uccccguuucagacuaaaaa

SEQ ID NO: 98179 - RNA, 20 nt, Artificial Sequence
  LRRK2 RNA guide
uccuuuuuagucugaaacgg

SEQ ID NO: 98180 - RNA, 20 nt, Artificial Sequence
  LRRK2 RNA guide
ucuccccguuucagacuaaa

SEQ ID NO: 98181 - RNA, 20 nt, Artificial Sequence
  LRRK2 RNA guide
ucuccuuuuuagucugaaac

SEQ ID NO: 98182 - RNA, 20 nt, Artificial Sequence
  LRRK2 RNA guide
ucuuuuccccacccacuugu

SEQ ID NO: 98183 - RNA, 20 nt, Artificial Sequence
  LRRK2 RNA guide
ugacuuugcuucuuuucccc

SEQ ID NO: 98184 - RNA, 20 nt, Artificial Sequence
  LRRK2 RNA guide
ugcuguggauugugacuuug

SEQ ID NO: 98185 - RNA, 20 nt, Artificial Sequence
  LRRK2 RNA guide
ugcuucuuuuccccacccac

SEQ ID NO: 98186 - RNA, 20 nt, Artificial Sequence
  LRRK2 RNA guide
uggaaaacaagugggugggg

SEQ ID NO: 98187 - RNA, 20 nt, Artificial Sequence
  LRRK2 RNA guide
uggauugugacuuugcuucu

SEQ ID NO: 98188 - RNA, 20 nt, Artificial Sequence
  LRRK2 RNA guide
uggggaaaagaagcaaaguc

SEQ ID NO: 98189 - RNA, 20 nt, Artificial Sequence
  LRRK2 RNA guide
uggguggggaaaagaagcaa

SEQ ID NO: 98190 - RNA, 20 nt, Artificial Sequence
  LRRK2 RNA guide
ugugacuuugcuucuuuucc

SEQ ID NO: 98191 - RNA, 20 nt, Artificial Sequence
  LRRK2 RNA guide
uguggauugugacuuugcuu

SEQ ID NO: 98192 - RNA, 20 nt, Artificial Sequence
  LRRK2 RNA guide
uucagacuaaaaaggagagg

SEQ ID NO: 98193 - RNA, 20 nt, Artificial Sequence
  LRRK2 RNA guide
uucuccccguuucagacuaa

SEQ ID NO: 98194 - RNA, 20 nt, Artificial Sequence
  LRRK2 RNA guide
uucuuuuccccacccacuug

SEQ ID NO: 98195 - RNA, 20 nt, Artificial Sequence
  LRRK2 RNA guide
uugcuucuuuuccccaccca

SEQ ID NO: 98196 - RNA, 20 nt, Artificial Sequence
  LRRK2 RNA guide
uugugacuuugcuucuuuuc

SEQ ID NO: 98197 - RNA, 20 nt, Artificial Sequence
  LRRK2 RNA guide
uuucagacuaaaaaggagag

SEQ ID NO: 98198 - RNA, 20 nt, Artificial Sequence
  LRRK2 RNA guide
uuugcuucuuuuccccaccc

SEQ ID NO: 98199 - RNA, 20 nt, Artificial Sequence
  LRRK2 RNA guide
uuuuccccacccacuuguuu

SEQ ID NO: 98200 - RNA, 21 nt, Artificial Sequence
  LRRK2 RNA guide
aaaaaggagagggggugcugu

SEQ ID NO: 98201 - RNA, 21 nt, Artificial Sequence
  LRRK2 RNA guide
aaaacaaguggguggggaaaa

SEQ ID NO: 98202 - RNA, 21 nt, Artificial Sequence
  LRRK2 RNA guide
aaaagaagcaaagucacaauc

SEQ ID NO: 98203 - RNA, 21 nt, Artificial Sequence
  LRRK2 RNA guide
aaaaggagagggggugcugug

SEQ ID NO: 98204 - RNA, 21 nt, Artificial Sequence
  LRRK2 RNA guide
aaacaaguggguggggaaaag

SEQ ID NO: 98205 - RNA, 21 nt, Artificial Sequence
  LRRK2 RNA guide
aaagaagcaaagucacaaucc

SEQ ID NO: 98206 - RNA, 21 nt, Artificial Sequence
  LRRK2 RNA guide
aaaggagagggggugcugugg

SEQ ID NO: 98207 - RNA, 21 nt, Artificial Sequence
  LRRK2 RNA guide
aaagucacaauccacagcacc

SEQ ID NO: 98208 - RNA, 21 nt, Artificial Sequence
  LRRK2 RNA guide
aacaaguggguggggaaaaga

SEQ ID NO: 98209 - RNA, 21 nt, Artificial Sequence
  LRRK2 RNA guide
aagaagcaaagucacaaucca

SEQ ID NO: 98210 - RNA, 21 nt, Artificial Sequence
  LRRK2 RNA guide
aagcaaagucacaauccacag

SEQ ID NO: 98211 - RNA, 21 nt, Artificial Sequence
  LRRK2 RNA guide
aaggagagggggugcugugga

SEQ ID NO: 98212 - RNA, 21 nt, Artificial Sequence
  LRRK2 RNA guide
aagucacaauccacagcaccc

SEQ ID NO: 98213 - RNA, 21 nt, Artificial Sequence
  LRRK2 RNA guide
aaguggguggggaaaagaagc

SEQ ID NO: 98214 - RNA, 21 nt, Artificial Sequence
  LRRK2 RNA guide
aauccacagcacccccucucc

SEQ ID NO: 98215 - RNA, 21 nt, Artificial Sequence
  LRRK2 RNA guide
acaaguggguggggaaaagaa

SEQ ID NO: 98216 - RNA, 21 nt, Artificial Sequence
  LRRK2 RNA guide
acaauccacagcacccccucu

SEQ ID NO: 98217 - RNA, 21 nt, Artificial Sequence
  LRRK2 RNA guide
acagcacccccucuccuuuuu

SEQ ID NO: 98218 - RNA, 21 nt, Artificial Sequence
  LRRK2 RNA guide
acccccucuccuuuuuagucu

SEQ ID NO: 98219 - RNA, 21 nt, Artificial Sequence
  LRRK2 RNA guide
acuaaaaaggagagggggugc

SEQ ID NO: 98220 - RNA, 21 nt, Artificial Sequence
  LRRK2 RNA guide
acuuugcuucuuuuccccacc

SEQ ID NO: 98221 - RNA, 21 nt, Artificial Sequence
  LRRK2 RNA guide
agaagcaaagucacaauccac

SEQ ID NO: 98222 - RNA, 21 nt, Artificial Sequence
  LRRK2 RNA guide
agacuaaaaaggagagggggu

SEQ ID NO: 98223 - RNA, 21 nt, Artificial Sequence
  LRRK2 RNA guide
agagggggugcuguggauugu

SEQ ID NO: 98224 - RNA, 21 nt, Artificial Sequence
  LRRK2 RNA guide
agcaaagucacaauccacagc

SEQ ID NO: 98225 - RNA, 21 nt, Artificial Sequence
  LRRK2 RNA guide
agcacccccucuccuuuuuag

SEQ ID NO: 98226 - RNA, 21 nt, Artificial Sequence
  LRRK2 RNA guide
aggagagggggugcuguggau

SEQ ID NO: 98227 - RNA, 21 nt, Artificial Sequence
  LRRK2 RNA guide
agggggugcuguggauuguga

SEQ ID NO: 98228 - RNA, 21 nt, Artificial Sequence
  LRRK2 RNA guide
agucacaauccacagcacccc

SEQ ID NO: 98229 - RNA, 21 nt, Artificial Sequence
  LRRK2 RNA guide
aguggguggggaaaagaagca

SEQ ID NO: 98230 - RNA, 21 nt, Artificial Sequence
  LRRK2 RNA guide
auccacagcacccccucuccu

SEQ ID NO: 98231 - RNA, 21 nt, Artificial Sequence
  LRRK2 RNA guide
auugugacuuugcuucuuuuc

SEQ ID NO: 98232 - RNA, 21 nt, Artificial Sequence
  LRRK2 RNA guide
caaagucacaauccacagcac

SEQ ID NO: 98233 - RNA, 21 nt, Artificial Sequence
  LRRK2 RNA guide
caaguggguggggaaaagaag

SEQ ID NO: 98234 - RNA, 21 nt, Artificial Sequence
  LRRK2 RNA guide
caauccacagcacccccucuc

SEQ ID NO: 98235 - RNA, 21 nt, Artificial Sequence
  LRRK2 RNA guide
cacaauccacagcacccccuc

SEQ ID NO: 98236 - RNA, 21 nt, Artificial Sequence
  LRRK2 RNA guide
cacagcacccccucuccuuuu

SEQ ID NO: 98237 - RNA, 21 nt, Artificial Sequence
  LRRK2 RNA guide
cacccccucuccuuuuuaguc

SEQ ID NO: 98238 - RNA, 21 nt, Artificial Sequence
  LRRK2 RNA guide
cagacuaaaaaggagaggggg

SEQ ID NO: 98239 - RNA, 21 nt, Artificial Sequence
  LRRK2 RNA guide
cagcacccccucuccuuuuua

SEQ ID NO: 98240 - RNA, 21 nt, Artificial Sequence
  LRRK2 RNA guide
ccacagcacccccucuccuuu

SEQ ID NO: 98241 - RNA, 21 nt, Artificial Sequence
  LRRK2 RNA guide
cccccucuccuuuuuagucug

SEQ ID NO: 98242 - RNA, 21 nt, Artificial Sequence
  LRRK2 RNA guide
ccccguuucagacuaaaaagg

SEQ ID NO: 98243 - RNA, 21 nt, Artificial Sequence
  LRRK2 RNA guide
ccccucuccuuuuuagucuga

SEQ ID NO: 98244 - RNA, 21 nt, Artificial Sequence
  LRRK2 RNA guide
cccguuucagacuaaaaagga

SEQ ID NO: 98245 - RNA, 21 nt, Artificial Sequence
  LRRK2 RNA guide
cccucuccuuuuuagucugaa

SEQ ID NO: 98246 - RNA, 21 nt, Artificial Sequence
  LRRK2 RNA guide
ccguuucagacuaaaaaggag

SEQ ID NO: 98247 - RNA, 21 nt, Artificial Sequence
  LRRK2 RNA guide
ccucuccuuuuuagucugaaa

SEQ ID NO: 98248 - RNA, 21 nt, Artificial Sequence
  LRRK2 RNA guide
ccuuuuuagucugaaacgggg

SEQ ID NO: 98249 - RNA, 21 nt, Artificial Sequence
  LRRK2 RNA guide
cguuucagacuaaaaaggaga

SEQ ID NO: 98250 - RNA, 21 nt, Artificial Sequence
  LRRK2 RNA guide
cuaaaaaggagagggggugcu

SEQ ID NO: 98251 - RNA, 21 nt, Artificial Sequence
  LRRK2 RNA guide
cuccccguuucagacuaaaaa

SEQ ID NO: 98252 - RNA, 21 nt, Artificial Sequence
  LRRK2 RNA guide
cuccuuuuuagucugaaacgg

SEQ ID NO: 98253 - RNA, 21 nt, Artificial Sequence
  LRRK2 RNA guide
cucuccuuuuuagucugaaac

SEQ ID NO: 98254 - RNA, 21 nt, Artificial Sequence
  LRRK2 RNA guide
cuggaaaacaagugggugggg

SEQ ID NO: 98255 - RNA, 21 nt, Artificial Sequence
  LRRK2 RNA guide
cuguggauugugacuuugcuu

SEQ ID NO: 98256 - RNA, 21 nt, Artificial Sequence
  LRRK2 RNA guide
cuucuuuuccccacccacuug

SEQ ID NO: 98257 - RNA, 21 nt, Artificial Sequence
  LRRK2 RNA guide
cuuugcuucuuuuccccaccc

SEQ ID NO: 98258 - RNA, 21 nt, Artificial Sequence
  LRRK2 RNA guide
cuuuuccccacccacuuguuu

SEQ ID NO: 98259 - RNA, 21 nt, Artificial Sequence
  LRRK2 RNA guide
gaaaacaaguggguggggaaa

SEQ ID NO: 98260 - RNA, 21 nt, Artificial Sequence
  LRRK2 RNA guide
gaaaagaagcaaagucacaau

SEQ ID NO: 98261 - RNA, 21 nt, Artificial Sequence
  LRRK2 RNA guide
gaagcaaagucacaauccaca

SEQ ID NO: 98262 - RNA, 21 nt, Artificial Sequence
  LRRK2 RNA guide
gacuaaaaaggagagggggug

SEQ ID NO: 98263 - RNA, 21 nt, Artificial Sequence
  LRRK2 RNA guide
gacuuugcuucuuuuccccac

SEQ ID NO: 98264 - RNA, 21 nt, Artificial Sequence
  LRRK2 RNA guide
gagagggggugcuguggauug

SEQ ID NO: 98265 - RNA, 21 nt, Artificial Sequence
  LRRK2 RNA guide
gagggggugcuguggauugug

SEQ ID NO: 98266 - RNA, 21 nt, Artificial Sequence
  LRRK2 RNA guide
gauugugacuuugcuucuuuu

SEQ ID NO: 98267 - RNA, 21 nt, Artificial Sequence
  LRRK2 RNA guide
gcaaagucacaauccacagca

SEQ ID NO: 98268 - RNA, 21 nt, Artificial Sequence
  LRRK2 RNA guide
gcacccccucuccuuuuuagu

SEQ ID NO: 98269 - RNA, 21 nt, Artificial Sequence
  LRRK2 RNA guide
gcuguggauugugacuuugcu

SEQ ID NO: 98270 - RNA, 21 nt, Artificial Sequence
  LRRK2 RNA guide
gcuucuuuuccccacccacuu

SEQ ID NO: 98271 - RNA, 21 nt, Artificial Sequence
  LRRK2 RNA guide
ggaaaacaaguggguggggaa

SEQ ID NO: 98272 - RNA, 21 nt, Artificial Sequence
  LRRK2 RNA guide
ggaaaagaagcaaagucacaa

SEQ ID NO: 98273 - RNA, 21 nt, Artificial Sequence
  LRRK2 RNA guide
ggagagggggugcuguggauu

SEQ ID NO: 98274 - RNA, 21 nt, Artificial Sequence
  LRRK2 RNA guide
ggauugugacuuugcuucuuu

SEQ ID NO: 98275 - RNA, 21 nt, Artificial Sequence
  LRRK2 RNA guide
gggaaaagaagcaaagucaca

SEQ ID NO: 98276 - RNA, 21 nt, Artificial Sequence
  LRRK2 RNA guide
ggggaaaagaagcaaagucac

SEQ ID NO: 98277 - RNA, 21 nt, Artificial Sequence
  LRRK2 RNA guide
gggggugcuguggauugugac

SEQ ID NO: 98278 - RNA, 21 nt, Artificial Sequence
  LRRK2 RNA guide
ggggugcuguggauugugacu

SEQ ID NO: 98279 - RNA, 21 nt, Artificial Sequence
  LRRK2 RNA guide
gggugcuguggauugugacuu

SEQ ID NO: 98280 - RNA, 21 nt, Artificial Sequence
  LRRK2 RNA guide
ggguggggaaaagaagcaaag

SEQ ID NO: 98281 - RNA, 21 nt, Artificial Sequence
  LRRK2 RNA guide
ggugcuguggauugugacuuu

SEQ ID NO: 98282 - RNA, 21 nt, Artificial Sequence
  LRRK2 RNA guide
gguggggaaaagaagcaaagu

SEQ ID NO: 98283 - RNA, 21 nt, Artificial Sequence
  LRRK2 RNA guide
gucacaauccacagcaccccc

SEQ ID NO: 98284 - RNA, 21 nt, Artificial Sequence
  LRRK2 RNA guide
gugacuuugcuucuuuucccc

SEQ ID NO: 98285 - RNA, 21 nt, Artificial Sequence
  LRRK2 RNA guide
gugcuguggauugugacuuug

SEQ ID NO: 98286 - RNA, 21 nt, Artificial Sequence
  LRRK2 RNA guide
guggauugugacuuugcuucu

SEQ ID NO: 98287 - RNA, 21 nt, Artificial Sequence
  LRRK2 RNA guide
guggggaaaagaagcaaaguc

SEQ ID NO: 98288 - RNA, 21 nt, Artificial Sequence
  LRRK2 RNA guide
guggguggggaaaagaagcaa

SEQ ID NO: 98289 - RNA, 21 nt, Artificial Sequence
  LRRK2 RNA guide
guuucagacuaaaaaggagag

SEQ ID NO: 98290 - RNA, 21 nt, Artificial Sequence
  LRRK2 RNA guide
uaaaaaggagagggggugcug

SEQ ID NO: 98291 - RNA, 21 nt, Artificial Sequence
  LRRK2 RNA guide
ucacaauccacagcacccccu

SEQ ID NO: 98292 - RNA, 21 nt, Artificial Sequence
  LRRK2 RNA guide
ucagacuaaaaaggagagggg

SEQ ID NO: 98293 - RNA, 21 nt, Artificial Sequence
  LRRK2 RNA guide
uccacagcacccccucuccuu

SEQ ID NO: 98294 - RNA, 21 nt, Artificial Sequence
  LRRK2 RNA guide
uccccguuucagacuaaaaag

SEQ ID NO: 98295 - RNA, 21 nt, Artificial Sequence
  LRRK2 RNA guide
uccuuuuuagucugaaacggg

SEQ ID NO: 98296 - RNA, 21 nt, Artificial Sequence
  LRRK2 RNA guide
ucuccccguuucagacuaaaa

SEQ ID NO: 98297 - RNA, 21 nt, Artificial Sequence
  LRRK2 RNA guide
ucuccuuuuuagucugaaacg

SEQ ID NO: 98298 - RNA, 21 nt, Artificial Sequence
  LRRK2 RNA guide
ucuuuuccccacccacuuguu

SEQ ID NO: 98299 - RNA, 21 nt, Artificial Sequence
  LRRK2 RNA guide
ugacuuugcuucuuuucccca

SEQ ID NO: 98300 - RNA, 21 nt, Artificial Sequence
  LRRK2 RNA guide
ugcuguggauugugacuuugc

SEQ ID NO: 98301 - RNA, 21 nt, Artificial Sequence
  LRRK2 RNA guide
ugcuucuuuuccccacccacu

SEQ ID NO: 98302 - RNA, 21 nt, Artificial Sequence
  LRRK2 RNA guide
uggaaaacaagugggugggga

SEQ ID NO: 98303 - RNA, 21 nt, Artificial Sequence
  LRRK2 RNA guide
uggauugugacuuugcuucuu

SEQ ID NO: 98304 - RNA, 21 nt, Artificial Sequence
  LRRK2 RNA guide
uggggaaaagaagcaaaguca

SEQ ID NO: 98305 - RNA, 21 nt, Artificial Sequence
  LRRK2 RNA guide
uggguggggaaaagaagcaaa

SEQ ID NO: 98306 - RNA, 21 nt, Artificial Sequence
  LRRK2 RNA guide
ugugacuuugcuucuuuuccc

SEQ ID NO: 98307 - RNA, 21 nt, Artificial Sequence
  LRRK2 RNA guide
uguggauugugacuuugcuuc

SEQ ID NO: 98308 - RNA, 21 nt, Artificial Sequence
  LRRK2 RNA guide
uucagacuaaaaaggagaggg

SEQ ID NO: 98309 - RNA, 21 nt, Artificial Sequence
  LRRK2 RNA guide
uucuccccguuucagacuaaa

SEQ ID NO: 98310 - RNA, 21 nt, Artificial Sequence
  LRRK2 RNA guide
uucuuuuccccacccacuugu

SEQ ID NO: 98311 - RNA, 21 nt, Artificial Sequence
  LRRK2 RNA guide
uugcuucuuuuccccacccac

SEQ ID NO: 98312 - RNA, 21 nt, Artificial Sequence
  LRRK2 RNA guide
uugugacuuugcuucuuuucc

SEQ ID NO: 98313 - RNA, 21 nt, Artificial Sequence
  LRRK2 RNA guide
uuucagacuaaaaaggagagg

SEQ ID NO: 98314 - RNA, 21 nt, Artificial Sequence
  LRRK2 RNA guide
uuucuccccguuucagacuaa

SEQ ID NO: 98315 - RNA, 21 nt, Artificial Sequence
  LRRK2 RNA guide
uuugcuucuuuuccccaccca

SEQ ID NO: 98316 - RNA, 22 nt, Artificial Sequence
  LRRK2 RNA guide
aaaaaggagagggggugcugug

SEQ ID NO: 98317 - RNA, 22 nt, Artificial Sequence
  LRRK2 RNA guide
aaaacaaguggguggggaaaag

SEQ ID NO: 98318 - RNA, 22 nt, Artificial Sequence
  LRRK2 RNA guide
aaaagaagcaaagucacaaucc

SEQ ID NO: 98319 - RNA, 22 nt, Artificial Sequence
  LRRK2 RNA guide
aaaaggagagggggugcugugg

SEQ ID NO: 98320 - RNA, 22 nt, Artificial Sequence
  LRRK2 RNA guide
aaacaaguggguggggaaaaga

SEQ ID NO: 98321 - RNA, 22 nt, Artificial Sequence
  LRRK2 RNA guide
aaagaagcaaagucacaaucca

SEQ ID NO: 98322 - RNA, 22 nt, Artificial Sequence
  LRRK2 RNA guide
aaaggagagggggugcugugga

SEQ ID NO: 98323 - RNA, 22 nt, Artificial Sequence
  LRRK2 RNA guide
aaagucacaauccacagcaccc

SEQ ID NO: 98324 - RNA, 22 nt, Artificial Sequence
  LRRK2 RNA guide
aacaaguggguggggaaaagaa

SEQ ID NO: 98325 - RNA, 22 nt, Artificial Sequence
  LRRK2 RNA guide
aagaagcaaagucacaauccac

SEQ ID NO: 98326 - RNA, 22 nt, Artificial Sequence
  LRRK2 RNA guide
aagcaaagucacaauccacagc

SEQ ID NO: 98327 - RNA, 22 nt, Artificial Sequence
  LRRK2 RNA guide
aaggagagggggugcuguggau

SEQ ID NO: 98328 - RNA, 22 nt, Artificial Sequence
  LRRK2 RNA guide
aagucacaauccacagcacccc

SEQ ID NO: 98329 - RNA, 22 nt, Artificial Sequence
  LRRK2 RNA guide
aaguggguggggaaaagaagca

SEQ ID NO: 98330 - RNA, 22 nt, Artificial Sequence
  LRRK2 RNA guide
aauccacagcacccccucuccu

SEQ ID NO: 98331 - RNA, 22 nt, Artificial Sequence
  LRRK2 RNA guide
acaaguggguggggaaaagaag

SEQ ID NO: 98332 - RNA, 22 nt, Artificial Sequence
  LRRK2 RNA guide
acaauccacagcacccccucuc

SEQ ID NO: 98333 - RNA, 22 nt, Artificial Sequence
  LRRK2 RNA guide
acagcacccccucuccuuuuua

SEQ ID NO: 98334 - RNA, 22 nt, Artificial Sequence
  LRRK2 RNA guide
acccccucuccuuuuuagucug

SEQ ID NO: 98335 - RNA, 22 nt, Artificial Sequence
  LRRK2 RNA guide
acuaaaaaggagagggggugcu

SEQ ID NO: 98336 - RNA, 22 nt, Artificial Sequence
  LRRK2 RNA guide
acuuugcuucuuuuccccaccc

SEQ ID NO: 98337 - RNA, 22 nt, Artificial Sequence
  LRRK2 RNA guide
agaagcaaagucacaauccaca

SEQ ID NO: 98338 - RNA, 22 nt, Artificial Sequence
  LRRK2 RNA guide
agacuaaaaaggagagggggug

SEQ ID NO: 98339 - RNA, 22 nt, Artificial Sequence
  LRRK2 RNA guide
agagggggugcuguggauugug

SEQ ID NO: 98340 - RNA, 22 nt, Artificial Sequence
  LRRK2 RNA guide
agcaaagucacaauccacagca

SEQ ID NO: 98341 - RNA, 22 nt, Artificial Sequence
  LRRK2 RNA guide
agcacccccucuccuuuuuagu

SEQ ID NO: 98342 - RNA, 22 nt, Artificial Sequence
  LRRK2 RNA guide
aggagagggggugcuguggauu

SEQ ID NO: 98343 - RNA, 22 nt, Artificial Sequence
  LRRK2 RNA guide
agggggugcuguggauugugac

SEQ ID NO: 98344 - RNA, 22 nt, Artificial Sequence
  LRRK2 RNA guide
agucacaauccacagcaccccc

SEQ ID NO: 98345 - RNA, 22 nt, Artificial Sequence
  LRRK2 RNA guide
aguggguggggaaaagaagcaa

SEQ ID NO: 98346 - RNA, 22 nt, Artificial Sequence
  LRRK2 RNA guide
auccacagcacccccucuccuu

SEQ ID NO: 98347 - RNA, 22 nt, Artificial Sequence
  LRRK2 RNA guide
auugugacuuugcuucuuuucc

SEQ ID NO: 98348 - RNA, 22 nt, Artificial Sequence
  LRRK2 RNA guide
caaagucacaauccacagcacc

SEQ ID NO: 98349 - RNA, 22 nt, Artificial Sequence
  LRRK2 RNA guide
caaguggguggggaaaagaagc

SEQ ID NO: 98350 - RNA, 22 nt, Artificial Sequence
  LRRK2 RNA guide
caauccacagcacccccucucc

SEQ ID NO: 98351 - RNA, 22 nt, Artificial Sequence
  LRRK2 RNA guide
cacaauccacagcacccccucu

SEQ ID NO: 98352 - RNA, 22 nt, Artificial Sequence
  LRRK2 RNA guide
cacagcacccccucuccuuuuu

SEQ ID NO: 98353 - RNA, 22 nt, Artificial Sequence
  LRRK2 RNA guide
cacccccucuccuuuuuagucu

SEQ ID NO: 98354 - RNA, 22 nt, Artificial Sequence
  LRRK2 RNA guide
cagacuaaaaaggagagggggu

SEQ ID NO: 98355 - RNA, 22 nt, Artificial Sequence
  LRRK2 RNA guide
cagcacccccucuccuuuuuag

SEQ ID NO: 98356 - RNA, 22 nt, Artificial Sequence
  LRRK2 RNA guide
ccacagcacccccucuccuuuu

SEQ ID NO: 98357 - RNA, 22 nt, Artificial Sequence
  LRRK2 RNA guide
cccccucuccuuuuuagucuga

SEQ ID NO: 98358 - RNA, 22 nt, Artificial Sequence
  LRRK2 RNA guide
ccccguuucagacuaaaaagga

SEQ ID NO: 98359 - RNA, 22 nt, Artificial Sequence
  LRRK2 RNA guide
ccccucuccuuuuuagucugaa

SEQ ID NO: 98360 - RNA, 22 nt, Artificial Sequence
  LRRK2 RNA guide
cccguuucagacuaaaaaggag

SEQ ID NO: 98361 - RNA, 22 nt, Artificial Sequence
  LRRK2 RNA guide
cccucuccuuuuuagucugaaa

SEQ ID NO: 98362 - RNA, 22 nt, Artificial Sequence
  LRRK2 RNA guide
ccguuucagacuaaaaaggaga

SEQ ID NO: 98363 - RNA, 22 nt, Artificial Sequence
  LRRK2 RNA guide
ccucuccuuuuuagucugaaac

SEQ ID NO: 98364 - RNA, 22 nt, Artificial Sequence
  LRRK2 RNA guide
ccuuuuuagucugaaacgggga

SEQ ID NO: 98365 - RNA, 22 nt, Artificial Sequence
  LRRK2 RNA guide
cguuucagacuaaaaaggagag

SEQ ID NO: 98366 - RNA, 22 nt, Artificial Sequence
  LRRK2 RNA guide
cuaaaaaggagagggggugcug

SEQ ID NO: 98367 - RNA, 22 nt, Artificial Sequence
  LRRK2 RNA guide
cuccccguuucagacuaaaaag

SEQ ID NO: 98368 - RNA, 22 nt, Artificial Sequence
  LRRK2 RNA guide
cuccuuuuuagucugaaacggg

SEQ ID NO: 98369 - RNA, 22 nt, Artificial Sequence
  LRRK2 RNA guide
cucuccuuuuuagucugaaacg

SEQ ID NO: 98370 - RNA, 22 nt, Artificial Sequence
  LRRK2 RNA guide
cuggaaaacaagugggugggga

SEQ ID NO: 98371 - RNA, 22 nt, Artificial Sequence
  LRRK2 RNA guide
cuguggauugugacuuugcuuc

SEQ ID NO: 98372 - RNA, 22 nt, Artificial Sequence
  LRRK2 RNA guide
cuucuuuuccccacccacuugu

SEQ ID NO: 98373 - RNA, 22 nt, Artificial Sequence
  LRRK2 RNA guide
cuuugcuucuuuuccccaccca

SEQ ID NO: 98374 - RNA, 22 nt, Artificial Sequence
  LRRK2 RNA guide
gaaaacaaguggguggggaaaa

SEQ ID NO: 98375 - RNA, 22 nt, Artificial Sequence
  LRRK2 RNA guide
gaaaagaagcaaagucacaauc

SEQ ID NO: 98376 - RNA, 22 nt, Artificial Sequence
  LRRK2 RNA guide
gaagcaaagucacaauccacag

SEQ ID NO: 98377 - RNA, 22 nt, Artificial Sequence
  LRRK2 RNA guide
gacuaaaaaggagagggggugc

SEQ ID NO: 98378 - RNA, 22 nt, Artificial Sequence
  LRRK2 RNA guide
gacuuugcuucuuuuccccacc

SEQ ID NO: 98379 - RNA, 22 nt, Artificial Sequence
  LRRK2 RNA guide
gagagggggugcuguggauugu

SEQ ID NO: 98380 - RNA, 22 nt, Artificial Sequence
  LRRK2 RNA guide
gagggggugcuguggauuguga

SEQ ID NO: 98381 - RNA, 22 nt, Artificial Sequence
  LRRK2 RNA guide
gauugugacuuugcuucuuuuc

SEQ ID NO: 98382 - RNA, 22 nt, Artificial Sequence
  LRRK2 RNA guide
gcaaagucacaauccacagcac

SEQ ID NO: 98383 - RNA, 22 nt, Artificial Sequence
  LRRK2 RNA guide
gcacccccucuccuuuuuaguc

SEQ ID NO: 98384 - RNA, 22 nt, Artificial Sequence
  LRRK2 RNA guide
gcuguggauugugacuuugcuu

SEQ ID NO: 98385 - RNA, 22 nt, Artificial Sequence
  LRRK2 RNA guide
gcuucuuuuccccacccacuug

SEQ ID NO: 98386 - RNA, 22 nt, Artificial Sequence
  LRRK2 RNA guide
ggaaaacaaguggguggggaaa

SEQ ID NO: 98387 - RNA, 22 nt, Artificial Sequence
  LRRK2 RNA guide
ggaaaagaagcaaagucacaau

SEQ ID NO: 98388 - RNA, 22 nt, Artificial Sequence
  LRRK2 RNA guide
ggagagggggugcuguggauug

SEQ ID NO: 98389 - RNA, 22 nt, Artificial Sequence
  LRRK2 RNA guide
ggauugugacuuugcuucuuuu

SEQ ID NO: 98390 - RNA, 22 nt, Artificial Sequence
  LRRK2 RNA guide
gggaaaagaagcaaagucacaa

SEQ ID NO: 98391 - RNA, 22 nt, Artificial Sequence
  LRRK2 RNA guide
ggggaaaagaagcaaagucaca

SEQ ID NO: 98392 - RNA, 22 nt, Artificial Sequence
  LRRK2 RNA guide
gggggugcuguggauugugacu

SEQ ID NO: 98393 - RNA, 22 nt, Artificial Sequence
  LRRK2 RNA guide
ggggugcuguggauugugacuu

SEQ ID NO: 98394 - RNA, 22 nt, Artificial Sequence
  LRRK2 RNA guide
gggugcuguggauugugacuuu

SEQ ID NO: 98395 - RNA, 22 nt, Artificial Sequence
  LRRK2 RNA guide
ggguggggaaaagaagcaaagu

SEQ ID NO: 98396 - RNA, 22 nt, Artificial Sequence
  LRRK2 RNA guide
ggugcuguggauugugacuuug

SEQ ID NO: 98397 - RNA, 22 nt, Artificial Sequence
  LRRK2 RNA guide
gguggggaaaagaagcaaaguc

SEQ ID NO: 98398 - RNA, 22 nt, Artificial Sequence
  LRRK2 RNA guide
gucacaauccacagcacccccu

SEQ ID NO: 98399 - RNA, 22 nt, Artificial Sequence
  LRRK2 RNA guide
gugacuuugcuucuuuucccca

SEQ ID NO: 98400 - RNA, 22 nt, Artificial Sequence
  LRRK2 RNA guide
gugcuguggauugugacuuugc

SEQ ID NO: 98401 - RNA, 22 nt, Artificial Sequence
  LRRK2 RNA guide
guggauugugacuuugcuucuu

SEQ ID NO: 98402 - RNA, 22 nt, Artificial Sequence
  LRRK2 RNA guide
guggggaaaagaagcaaaguca

SEQ ID NO: 98403 - RNA, 22 nt, Artificial Sequence
  LRRK2 RNA guide
guggguggggaaaagaagcaaa

SEQ ID NO: 98404 - RNA, 22 nt, Artificial Sequence
  LRRK2 RNA guide
guuucagacuaaaaaggagagg

SEQ ID NO: 98405 - RNA, 22 nt, Artificial Sequence
  LRRK2 RNA guide
uaaaaaggagagggggugcugu

SEQ ID NO: 98406 - RNA, 22 nt, Artificial Sequence
  LRRK2 RNA guide
ucacaauccacagcacccccuc

SEQ ID NO: 98407 - RNA, 22 nt, Artificial Sequence
  LRRK2 RNA guide
ucagacuaaaaaggagaggggg

SEQ ID NO: 98408 - RNA, 22 nt, Artificial Sequence
  LRRK2 RNA guide
uccacagcacccccucuccuuu

SEQ ID NO: 98409 - RNA, 22 nt, Artificial Sequence
  LRRK2 RNA guide
uccccguuucagacuaaaaagg

SEQ ID NO: 98410 - RNA, 22 nt, Artificial Sequence
  LRRK2 RNA guide
uccuuuuuagucugaaacgggg

SEQ ID NO: 98411 - RNA, 22 nt, Artificial Sequence
  LRRK2 RNA guide
ucuccccguuucagacuaaaaa

SEQ ID NO: 98412 - RNA, 22 nt, Artificial Sequence
  LRRK2 RNA guide
ucuccuuuuuagucugaaacgg

SEQ ID NO: 98413 - RNA, 22 nt, Artificial Sequence
  LRRK2 RNA guide
ucuuuuccccacccacuuguuu

SEQ ID NO: 98414 - RNA, 22 nt, Artificial Sequence
  LRRK2 RNA guide
ugacuuugcuucuuuuccccac

SEQ ID NO: 98415 - RNA, 22 nt, Artificial Sequence
  LRRK2 RNA guide
ugcuguggauugugacuuugcu

SEQ ID NO: 98416 - RNA, 22 nt, Artificial Sequence
  LRRK2 RNA guide
ugcuucuuuuccccacccacuu

SEQ ID NO: 98417 - RNA, 22 nt, Artificial Sequence
  LRRK2 RNA guide
uggaaaacaaguggguggggaa

SEQ ID NO: 98418 - RNA, 22 nt, Artificial Sequence
  LRRK2 RNA guide
uggauugugacuuugcuucuuu

SEQ ID NO: 98419 - RNA, 22 nt, Artificial Sequence
  LRRK2 RNA guide
uggggaaaagaagcaaagucac

SEQ ID NO: 98420 - RNA, 22 nt, Artificial Sequence
  LRRK2 RNA guide
uggguggggaaaagaagcaaag

SEQ ID NO: 98421 - RNA, 22 nt, Artificial Sequence
  LRRK2 RNA guide
ugugacuuugcuucuuuucccc

SEQ ID NO: 98422 - RNA, 22 nt, Artificial Sequence
  LRRK2 RNA guide
uguggauugugacuuugcuucu

SEQ ID NO: 98423 - RNA, 22 nt, Artificial Sequence
  LRRK2 RNA guide
uucagacuaaaaaggagagggg

SEQ ID NO: 98424 - RNA, 22 nt, Artificial Sequence
  LRRK2 RNA guide
uucuccccguuucagacuaaaa

SEQ ID NO: 98425 - RNA, 22 nt, Artificial Sequence
  LRRK2 RNA guide
uucuuuuccccacccacuuguu

SEQ ID NO: 98426 - RNA, 22 nt, Artificial Sequence
  LRRK2 RNA guide
uugcuucuuuuccccacccacu

SEQ ID NO: 98427 - RNA, 22 nt, Artificial Sequence
  LRRK2 RNA guide
uugugacuuugcuucuuuuccc

SEQ ID NO: 98428 - RNA, 22 nt, Artificial Sequence
  LRRK2 RNA guide
uuucagacuaaaaaggagaggg

SEQ ID NO: 98429 - RNA, 22 nt, Artificial Sequence
  LRRK2 RNA guide
uuucuccccguuucagacuaaa

SEQ ID NO: 98430 - RNA, 22 nt, Artificial Sequence
  LRRK2 RNA guide
uuugcuucuuuuccccacccac

SEQ ID NO: 98431 - RNA, 22 nt, Artificial Sequence
  LRRK2 RNA guide
uuuucuccccguuucagacuaa

SEQ ID NO: 98432 - RNA, 20 nt, Artificial Sequence
  LRRK2 RNA guide
aaaagucuucuauguaggcc

SEQ ID NO: 98433 - RNA, 20 nt, Artificial Sequence
  LRRK2 RNA guide
aaaaguucuuuggauauggu

SEQ ID NO: 98434 - RNA, 20 nt, Artificial Sequence
  LRRK2 RNA guide
aaaaucugugauccacuccu

SEQ ID NO: 98435 - RNA, 20 nt, Artificial Sequence
  LRRK2 RNA guide
aaacgagguaauguguguga

SEQ ID NO: 98436 - RNA, 20 nt, Artificial Sequence
  LRRK2 RNA guide
aaagaacuuuucacacacau

SEQ ID NO: 98437 - RNA, 20 nt, Artificial Sequence
  LRRK2 RNA guide
aaagguuaagcuguuuucuc

SEQ ID NO: 98438 - RNA, 20 nt, Artificial Sequence
  LRRK2 RNA guide
aaagucuucuauguaggccc

SEQ ID NO: 98439 - RNA, 20 nt, Artificial Sequence
  LRRK2 RNA guide
aaaguucuuuggauauggua

SEQ ID NO: 98440 - RNA, 20 nt, Artificial Sequence
  LRRK2 RNA guide
aaauaacaaaaucugugauc

SEQ ID NO: 98441 - RNA, 20 nt, Artificial Sequence
  LRRK2 RNA guide
aaauaccuuggaacugaauu

SEQ ID NO: 98442 - RNA, 20 nt, Artificial Sequence
  LRRK2 RNA guide
aaaucugugauccacuccuu

SEQ ID NO: 98443 - RNA, 20 nt, Artificial Sequence
  LRRK2 RNA guide
aacaaaaucugugauccacu

SEQ ID NO: 98444 - RNA, 20 nt, Artificial Sequence
  LRRK2 RNA guide
aacauuguaacuuugggaag

SEQ ID NO: 98445 - RNA, 20 nt, Artificial Sequence
  LRRK2 RNA guide
aaccuuucuauaaaauaggc

SEQ ID NO: 98446 - RNA, 20 nt, Artificial Sequence
  LRRK2 RNA guide
aacgagguaaugugugugaa

SEQ ID NO: 98447 - RNA, 20 nt, Artificial Sequence
  LRRK2 RNA guide
aacuuugggaaggguaaugu

SEQ ID NO: 98448 - RNA, 20 nt, Artificial Sequence
  LRRK2 RNA guide
aacuuuucacacacauuacc

SEQ ID NO: 98449 - RNA, 20 nt, Artificial Sequence
  LRRK2 RNA guide
aagaacuuuucacacacauu

SEQ ID NO: 98450 - RNA, 20 nt, Artificial Sequence
  LRRK2 RNA guide
aagaauugcagcaaggagug

SEQ ID NO: 98451 - RNA, 20 nt, Artificial Sequence
  LRRK2 RNA guide
aagacacaaauaccuuggaa

SEQ ID NO: 98452 - RNA, 20 nt, Artificial Sequence
  LRRK2 RNA guide
aagcuguuuucucagacuca

SEQ ID NO: 98453 - RNA, 20 nt, Artificial Sequence
  LRRK2 RNA guide
aaggaguggaucacagauuu

SEQ ID NO: 98454 - RNA, 20 nt, Artificial Sequence
  LRRK2 RNA guide
aaggguaauguauaaauacu

SEQ ID NO: 98455 - RNA, 20 nt, Artificial Sequence
  LRRK2 RNA guide
aagggucaccuagaaaauag

SEQ ID NO: 98456 - RNA, 20 nt, Artificial Sequence
  LRRK2 RNA guide
aagguuaagcuguuuucuca

SEQ ID NO: 98457 - RNA, 20 nt, Artificial Sequence
  LRRK2 RNA guide
aaguucuuuggauaugguaa

SEQ ID NO: 98458 - RNA, 20 nt, Artificial Sequence
  LRRK2 RNA guide
aauaacaaaaucugugaucc

SEQ ID NO: 98459 - RNA, 20 nt, Artificial Sequence
  LRRK2 RNA guide
aauaccuuggaacugaauuc

SEQ ID NO: 98460 - RNA, 20 nt, Artificial Sequence
  LRRK2 RNA guide
aauauaauugaagggucacc

SEQ ID NO: 98461 - RNA, 20 nt, Artificial Sequence
  LRRK2 RNA guide
aaucugugauccacuccuug

SEQ ID NO: 98462 - RNA, 20 nt, Artificial Sequence
  LRRK2 RNA guide
aaugugugugaaaaguucuu

SEQ ID NO: 98463 - RNA, 20 nt, Artificial Sequence
  LRRK2 RNA guide
aauguuaaacgagguaaugu

SEQ ID NO: 98464 - RNA, 20 nt, Artificial Sequence
  LRRK2 RNA guide
aauuaagaauugcagcaagg

SEQ ID NO: 98465 - RNA, 20 nt, Artificial Sequence
  LRRK2 RNA guide
aauuaugugagucugagaaa

SEQ ID NO: 98466 - RNA, 20 nt, Artificial Sequence
  LRRK2 RNA guide
aauucaguuccaagguauuu

SEQ ID NO: 98467 - RNA, 20 nt, Artificial Sequence
  LRRK2 RNA guide
aauucuauuuucuaggugac

SEQ ID NO: 98468 - RNA, 20 nt, Artificial Sequence
  LRRK2 RNA guide
aauugaagggucaccuagaa

SEQ ID NO: 98469 - RNA, 20 nt, Artificial Sequence
  LRRK2 RNA guide
aauugcagcaaggaguggau

SEQ ID NO: 98470 - RNA, 20 nt, Artificial Sequence
  LRRK2 RNA guide
aauugugaauucaguuccaa

SEQ ID NO: 98471 - RNA, 20 nt, Artificial Sequence
  LRRK2 RNA guide
acaaaaucugugauccacuc

SEQ ID NO: 98472 - RNA, 20 nt, Artificial Sequence
  LRRK2 RNA guide
acaaauaccuuggaacugaa

SEQ ID NO: 98473 - RNA, 20 nt, Artificial Sequence
  LRRK2 RNA guide
acaauguuaaacgagguaau

SEQ ID NO: 98474 - RNA, 20 nt, Artificial Sequence
  LRRK2 RNA guide
acaauucuauuuucuaggug

SEQ ID NO: 98475 - RNA, 20 nt, Artificial Sequence
  LRRK2 RNA guide
acacaaauaccuuggaacug

SEQ ID NO: 98476 - RNA, 20 nt, Artificial Sequence
  LRRK2 RNA guide
acacacauuaccucguuuaa

SEQ ID NO: 98477 - RNA, 20 nt, Artificial Sequence
  LRRK2 RNA guide
acacauuaccucguuuaaca

SEQ ID NO: 98478 - RNA, 20 nt, Artificial Sequence
  LRRK2 RNA guide
acacuuagauggauggauau

SEQ ID NO: 98479 - RNA, 20 nt, Artificial Sequence
  LRRK2 RNA guide
acauaauuaagaauugcagc

SEQ ID NO: 98480 - RNA, 20 nt, Artificial Sequence
  LRRK2 RNA guide
acauaguaucaguauaucca

SEQ ID NO: 98481 - RNA, 20 nt, Artificial Sequence
  LRRK2 RNA guide
acauuacccuucccaaaguu

SEQ ID NO: 98482 - RNA, 20 nt, Artificial Sequence
  LRRK2 RNA guide
acauuaccucguuuaacauu

SEQ ID NO: 98483 - RNA, 20 nt, Artificial Sequence
  LRRK2 RNA guide
acauuguaacuuugggaagg

SEQ ID NO: 98484 - RNA, 20 nt, Artificial Sequence
  LRRK2 RNA guide
accauauccaaagaacuuuu

SEQ ID NO: 98485 - RNA, 20 nt, Artificial Sequence
  LRRK2 RNA guide
acccuucccaaaguuacaau

SEQ ID NO: 98486 - RNA, 20 nt, Artificial Sequence
  LRRK2 RNA guide
accucguuuaacauuguaac

SEQ ID NO: 98487 - RNA, 20 nt, Artificial Sequence
  LRRK2 RNA guide
accuuaccauauccaaagaa

SEQ ID NO: 98488 - RNA, 20 nt, Artificial Sequence
  LRRK2 RNA guide
accuuggaacugaauucaca

SEQ ID NO: 98489 - RNA, 20 nt, Artificial Sequence
  LRRK2 RNA guide
accuuucuauaaaauaggcu

SEQ ID NO: 98490 - RNA, 20 nt, Artificial Sequence
  LRRK2 RNA guide
acgagguaaugugugugaaa

SEQ ID NO: 98491 - RNA, 20 nt, Artificial Sequence
  LRRK2 RNA guide
acucacauaauuaagaauug

SEQ ID NO: 98492 - RNA, 20 nt, Artificial Sequence
  LRRK2 RNA guide
acucauauuuguaccuuacc

SEQ ID NO: 98493 - RNA, 20 nt, Artificial Sequence
  LRRK2 RNA guide
acuccuugcugcaauucuua

SEQ ID NO: 98494 - RNA, 20 nt, Artificial Sequence
  LRRK2 RNA guide
acugagccuauuuuauagaa

SEQ ID NO: 98495 - RNA, 20 nt, Artificial Sequence
  LRRK2 RNA guide
acuuagauggauggauauac

SEQ ID NO: 98496 - RNA, 20 nt, Artificial Sequence
  LRRK2 RNA guide
acuuugggaaggguaaugua

SEQ ID NO: 98497 - RNA, 20 nt, Artificial Sequence
  LRRK2 RNA guide
acuuuucacacacauuaccu

SEQ ID NO: 98498 - RNA, 20 nt, Artificial Sequence
  LRRK2 RNA guide
agaaagguuaagcuguuuuc

SEQ ID NO: 98499 - RNA, 20 nt, Artificial Sequence
  LRRK2 RNA guide
agaacuuuucacacacauua

SEQ ID NO: 98500 - RNA, 20 nt, Artificial Sequence
  LRRK2 RNA guide
agaauugcagcaaggagugg

SEQ ID NO: 98501 - RNA, 20 nt, Artificial Sequence
  LRRK2 RNA guide
agaauugugaauucaguucc

SEQ ID NO: 98502 - RNA, 20 nt, Artificial Sequence
  LRRK2 RNA guide
agacacaaauaccuuggaac

SEQ ID NO: 98503 - RNA, 20 nt, Artificial Sequence
  LRRK2 RNA guide
agacucacauaauuaagaau

SEQ ID NO: 98504 - RNA, 20 nt, Artificial Sequence
  LRRK2 RNA guide
agauggacacuuagauggau

SEQ ID NO: 98505 - RNA, 20 nt, Artificial Sequence
  LRRK2 RNA guide
agauggauggauauacugau

SEQ ID NO: 98506 - RNA, 20 nt, Artificial Sequence
  LRRK2 RNA guide
agcaaggaguggaucacaga

SEQ ID NO: 98507 - RNA, 20 nt, Artificial Sequence
  LRRK2 RNA guide
agccuauuuuauagaaaggu

SEQ ID NO: 98508 - RNA, 20 nt, Artificial Sequence
  LRRK2 RNA guide
agcuguuuucucagacucac

SEQ ID NO: 98509 - RNA, 20 nt, Artificial Sequence
  LRRK2 RNA guide
agcuuaaccuuucuauaaaa

SEQ ID NO: 98510 - RNA, 20 nt, Artificial Sequence
  LRRK2 RNA guide
aggaguggaucacagauuuu

SEQ ID NO: 98511 - RNA, 20 nt, Artificial Sequence
  LRRK2 RNA guide
aggcucaguauuuauacauu

SEQ ID NO: 98512 - RNA, 20 nt, Artificial Sequence
  LRRK2 RNA guide
agggccuacauagaagacuu

SEQ ID NO: 98513 - RNA, 20 nt, Artificial Sequence
  LRRK2 RNA guide
aggguaauguauaaauacug

SEQ ID NO: 98514 - RNA, 20 nt, Artificial Sequence
  LRRK2 RNA guide
agggucaccuagaaaauaga

SEQ ID NO: 98515 - RNA, 20 nt, Artificial Sequence
  LRRK2 RNA guide
agguaaugugugugaaaagu

SEQ ID NO: 98516 - RNA, 20 nt, Artificial Sequence
  LRRK2 RNA guide
aggugacccuucaauuauau

SEQ ID NO: 98517 - RNA, 20 nt, Artificial Sequence
  LRRK2 RNA guide
agguuaagcuguuuucucag

SEQ ID NO: 98518 - RNA, 20 nt, Artificial Sequence
  LRRK2 RNA guide
aguauauccauccaucuaag

SEQ ID NO: 98519 - RNA, 20 nt, Artificial Sequence
  LRRK2 RNA guide
aguaucaguauauccaucca

SEQ ID NO: 98520 - RNA, 20 nt, Artificial Sequence
  LRRK2 RNA guide
aguauuuagauggacacuua

SEQ ID NO: 98521 - RNA, 20 nt, Artificial Sequence
  LRRK2 RNA guide
aguauuuauacauuacccuu

SEQ ID NO: 98522 - RNA, 20 nt, Artificial Sequence
  LRRK2 RNA guide
agucugagaaaacagcuuaa

SEQ ID NO: 98523 - RNA, 20 nt, Artificial Sequence
  LRRK2 RNA guide
aguuacaauguuaaacgagg

SEQ ID NO: 98524 - RNA, 20 nt, Artificial Sequence
  LRRK2 RNA guide
aguuccaagguauuuguguc

SEQ ID NO: 98525 - RNA, 20 nt, Artificial Sequence
  LRRK2 RNA guide
aguucuuuggauaugguaag

SEQ ID NO: 98526 - RNA, 20 nt, Artificial Sequence
  LRRK2 RNA guide
aguuuaagacacaaauaccu

SEQ ID NO: 98527 - RNA, 20 nt, Artificial Sequence
  LRRK2 RNA guide
auaacaaaaucugugaucca

SEQ ID NO: 98528 - RNA, 20 nt, Artificial Sequence
  LRRK2 RNA guide
auaauuaagaauugcagcaa

SEQ ID NO: 98529 - RNA, 20 nt, Artificial Sequence
  LRRK2 RNA guide
auaauugaagggucaccuag

SEQ ID NO: 98530 - RNA, 20 nt, Artificial Sequence
  LRRK2 RNA guide
auacauuacccuucccaaag

SEQ ID NO: 98531 - RNA, 20 nt, Artificial Sequence
  LRRK2 RNA guide
auaccuuggaacugaauuca

SEQ ID NO: 98532 - RNA, 20 nt, Artificial Sequence
  LRRK2 RNA guide
auacugagccuauuuuauag

SEQ ID NO: 98533 - RNA, 20 nt, Artificial Sequence
  LRRK2 RNA guide
auagaaagguuaagcuguuu

SEQ ID NO: 98534 - RNA, 20 nt, Artificial Sequence
  LRRK2 RNA guide
auagaauugugaauucaguu

SEQ ID NO: 98535 - RNA, 20 nt, Artificial Sequence
  LRRK2 RNA guide
auaggcucaguauuuauaca

SEQ ID NO: 98536 - RNA, 20 nt, Artificial Sequence
  LRRK2 RNA guide
auaguaucaguauauccauc

SEQ ID NO: 98537 - RNA, 20 nt, Artificial Sequence
  LRRK2 RNA guide
auaguuuaagacacaaauac

SEQ ID NO: 98538 - RNA, 20 nt, Artificial Sequence
  LRRK2 RNA guide
auauaauugaagggucaccu

SEQ ID NO: 98539 - RNA, 20 nt, Artificial Sequence
  LRRK2 RNA guide
auauccaaagaacuuuucac

SEQ ID NO: 98540 - RNA, 20 nt, Artificial Sequence
  LRRK2 RNA guide
auauccauccaucuaagugu

SEQ ID NO: 98541 - RNA, 20 nt, Artificial Sequence
  LRRK2 RNA guide
aucaaaagucuucuauguag

SEQ ID NO: 98542 - RNA, 20 nt, Artificial Sequence
  LRRK2 RNA guide
aucaguauauccauccaucu

SEQ ID NO: 98543 - RNA, 20 nt, Artificial Sequence
  LRRK2 RNA guide
auccaaagaacuuuucacac

SEQ ID NO: 98544 - RNA, 20 nt, Artificial Sequence
  LRRK2 RNA guide
auccacuccuugcugcaauu

SEQ ID NO: 98545 - RNA, 20 nt, Artificial Sequence
  LRRK2 RNA guide
auccauccaucuaagugucc

SEQ ID NO: 98546 - RNA, 20 nt, Artificial Sequence
  LRRK2 RNA guide
auccaucuaaguguccaucu

SEQ ID NO: 98547 - RNA, 20 nt, Artificial Sequence
  LRRK2 RNA guide
aucuaaguguccaucuaaau

SEQ ID NO: 98548 - RNA, 20 nt, Artificial Sequence
  LRRK2 RNA guide
aucugugauccacuccuugc

SEQ ID NO: 98549 - RNA, 20 nt, Artificial Sequence
  LRRK2 RNA guide
augaguauuuagauggacac

SEQ ID NO: 98550 - RNA, 20 nt, Artificial Sequence
  LRRK2 RNA guide
auggacacuuagauggaugg

SEQ ID NO: 98551 - RNA, 20 nt, Artificial Sequence
  LRRK2 RNA guide
auggauggauauacugauac

SEQ ID NO: 98552 - RNA, 20 nt, Artificial Sequence
  LRRK2 RNA guide
augugagucugagaaaacag

SEQ ID NO: 98553 - RNA, 20 nt, Artificial Sequence
  LRRK2 RNA guide
augugugugaaaaguucuuu

SEQ ID NO: 98554 - RNA, 20 nt, Artificial Sequence
  LRRK2 RNA guide
auguuaaacgagguaaugug

SEQ ID NO: 98555 - RNA, 20 nt, Artificial Sequence
  LRRK2 RNA guide
auuaagaauugcagcaagga

SEQ ID NO: 98556 - RNA, 20 nt, Artificial Sequence
  LRRK2 RNA guide
auuacccuucccaaaguuac

SEQ ID NO: 98557 - RNA, 20 nt, Artificial Sequence
  LRRK2 RNA guide
auuaugugagucugagaaaa

SEQ ID NO: 98558 - RNA, 20 nt, Artificial Sequence
  LRRK2 RNA guide
auucaauauaauugaagggu

SEQ ID NO: 98559 - RNA, 20 nt, Artificial Sequence
  LRRK2 RNA guide
auucaguuccaagguauuug

SEQ ID NO: 98560 - RNA, 20 nt, Artificial Sequence
  LRRK2 RNA guide
auucuauuuucuaggugacc

SEQ ID NO: 98561 - RNA, 20 nt, Artificial Sequence
  LRRK2 RNA guide
auugaagggucaccuagaaa

SEQ ID NO: 98562 - RNA, 20 nt, Artificial Sequence
  LRRK2 RNA guide
auugcagcaaggaguggauc

SEQ ID NO: 98563 - RNA, 20 nt, Artificial Sequence
  LRRK2 RNA guide
auuguaacuuugggaagggu

SEQ ID NO: 98564 - RNA, 20 nt, Artificial Sequence
  LRRK2 RNA guide
auugugaauucaguuccaag

SEQ ID NO: 98565 - RNA, 20 nt, Artificial Sequence
  LRRK2 RNA guide
auuuagauggacacuuagau

SEQ ID NO: 98566 - RNA, 20 nt, Artificial Sequence
  LRRK2 RNA guide
auuuauacauuacccuuccc

SEQ ID NO: 98567 - RNA, 20 nt, Artificial Sequence
  LRRK2 RNA guide
auuuguaccuuaccauaucc

SEQ ID NO: 98568 - RNA, 20 nt, Artificial Sequence
  LRRK2 RNA guide
auuuucuaggugacccuuca

SEQ ID NO: 98569 - RNA, 20 nt, Artificial Sequence
  LRRK2 RNA guide
caaaagucuucuauguaggc

SEQ ID NO: 98570 - RNA, 20 nt, Artificial Sequence
  LRRK2 RNA guide
caaaaucugugauccacucc

SEQ ID NO: 98571 - RNA, 20 nt, Artificial Sequence
  LRRK2 RNA guide
caaagaacuuuucacacaca

SEQ ID NO: 98572 - RNA, 20 nt, Artificial Sequence
  LRRK2 RNA guide
caaaguuacaauguuaaacg

SEQ ID NO: 98573 - RNA, 20 nt, Artificial Sequence
  LRRK2 RNA guide
caaauaugaguauuuagaug

SEQ ID NO: 98574 - RNA, 20 nt, Artificial Sequence
  LRRK2 RNA guide
caacaaauuugcaucaaaag

SEQ ID NO: 98575 - RNA, 20 nt, Artificial Sequence
  LRRK2 RNA guide
caaggaguggaucacagauu

SEQ ID NO: 98576 - RNA, 20 nt, Artificial Sequence
  LRRK2 RNA guide
caagguauuugugucuuaaa

SEQ ID NO: 98577 - RNA, 20 nt, Artificial Sequence
  LRRK2 RNA guide
caauauaauugaagggucac

SEQ ID NO: 98578 - RNA, 20 nt, Artificial Sequence
  LRRK2 RNA guide
caauguuaaacgagguaaug

SEQ ID NO: 98579 - RNA, 20 nt, Artificial Sequence
  LRRK2 RNA guide
caauucuauuuucuagguga

SEQ ID NO: 98580 - RNA, 20 nt, Artificial Sequence
  LRRK2 RNA guide
caauucuuaauuaugugagu

SEQ ID NO: 98581 - RNA, 20 nt, Artificial Sequence
  LRRK2 RNA guide
cacaaauaccuuggaacuga

SEQ ID NO: 98582 - RNA, 20 nt, Artificial Sequence
  LRRK2 RNA guide
cacaauucuauuuucuaggu

SEQ ID NO: 98583 - RNA, 20 nt, Artificial Sequence
  LRRK2 RNA guide
cacacacauuaccucguuua

SEQ ID NO: 98584 - RNA, 20 nt, Artificial Sequence
  LRRK2 RNA guide
cacacauuaccucguuuaac

SEQ ID NO: 98585 - RNA, 20 nt, Artificial Sequence
  LRRK2 RNA guide
cacauaauuaagaauugcag

SEQ ID NO: 98586 - RNA, 20 nt, Artificial Sequence
  LRRK2 RNA guide
cacauuaccucguuuaacau

SEQ ID NO: 98587 - RNA, 20 nt, Artificial Sequence
  LRRK2 RNA guide
cacuccuugcugcaauucuu

SEQ ID NO: 98588 - RNA, 20 nt, Artificial Sequence
  LRRK2 RNA guide
cacuuagauggauggauaua

SEQ ID NO: 98589 - RNA, 20 nt, Artificial Sequence
  LRRK2 RNA guide
cagacucacauaauuaagaa

SEQ ID NO: 98590 - RNA, 20 nt, Artificial Sequence
  LRRK2 RNA guide
cagcaaggaguggaucacag

SEQ ID NO: 98591 - RNA, 20 nt, Artificial Sequence
  LRRK2 RNA guide
caguauauccauccaucuaa

SEQ ID NO: 98592 - RNA, 20 nt, Artificial Sequence
  LRRK2 RNA guide
caguuccaagguauuugugu

SEQ ID NO: 98593 - RNA, 20 nt, Artificial Sequence
  LRRK2 RNA guide
cauaauuaagaauugcagca

SEQ ID NO: 98594 - RNA, 20 nt, Artificial Sequence
  LRRK2 RNA guide
cauaguaucaguauauccau

SEQ ID NO: 98595 - RNA, 20 nt, Artificial Sequence
  LRRK2 RNA guide
cauaguuuaagacacaaaua

SEQ ID NO: 98596 - RNA, 20 nt, Artificial Sequence
  LRRK2 RNA guide
cauauccaaagaacuuuuca

SEQ ID NO: 98597 - RNA, 20 nt, Artificial Sequence
  LRRK2 RNA guide
cauauuuguaccuuaccaua

SEQ ID NO: 98598 - RNA, 20 nt, Artificial Sequence
  LRRK2 RNA guide
caucaaaagucuucuaugua

SEQ ID NO: 98599 - RNA, 20 nt, Artificial Sequence
  LRRK2 RNA guide
cauccaucuaaguguccauc

SEQ ID NO: 98600 - RNA, 20 nt, Artificial Sequence
  LRRK2 RNA guide
caucuaaguguccaucuaaa

SEQ ID NO: 98601 - RNA, 20 nt, Artificial Sequence
  LRRK2 RNA guide
cauuacccuucccaaaguua

SEQ ID NO: 98602 - RNA, 20 nt, Artificial Sequence
  LRRK2 RNA guide
cauuaccucguuuaacauug

SEQ ID NO: 98603 - RNA, 20 nt, Artificial Sequence
  LRRK2 RNA guide
cauuguaacuuugggaaggg

SEQ ID NO: 98604 - RNA, 20 nt, Artificial Sequence
  LRRK2 RNA guide
ccaaagaacuuuucacacac

SEQ ID NO: 98605 - RNA, 20 nt, Artificial Sequence
  LRRK2 RNA guide
ccaaaguuacaauguuaaac

SEQ ID NO: 98606 - RNA, 20 nt, Artificial Sequence
  LRRK2 RNA guide
ccaagguauuugugucuuaa

SEQ ID NO: 98607 - RNA, 20 nt, Artificial Sequence
  LRRK2 RNA guide
ccacuccuugcugcaauucu

SEQ ID NO: 98608 - RNA, 20 nt, Artificial Sequence
  LRRK2 RNA guide
ccauauccaaagaacuuuuc

SEQ ID NO: 98609 - RNA, 20 nt, Artificial Sequence
  LRRK2 RNA guide
ccauccaucuaaguguccau

SEQ ID NO: 98610 - RNA, 20 nt, Artificial Sequence
  LRRK2 RNA guide
ccaucuaaguguccaucuaa

SEQ ID NO: 98611 - RNA, 20 nt, Artificial Sequence
  LRRK2 RNA guide
cccuucccaaaguuacaaug

SEQ ID NO: 98612 - RNA, 20 nt, Artificial Sequence
  LRRK2 RNA guide
ccuacauagaagacuuuuga

SEQ ID NO: 98613 - RNA, 20 nt, Artificial Sequence
  LRRK2 RNA guide
ccuagggccuacauagaaga

SEQ ID NO: 98614 - RNA, 20 nt, Artificial Sequence
  LRRK2 RNA guide
ccuauuuuauagaaagguua

SEQ ID NO: 98615 - RNA, 20 nt, Artificial Sequence
  LRRK2 RNA guide
ccucguuuaacauuguaacu

SEQ ID NO: 98616 - RNA, 20 nt, Artificial Sequence
  LRRK2 RNA guide
ccuuaccauauccaaagaac

SEQ ID NO: 98617 - RNA, 20 nt, Artificial Sequence
  LRRK2 RNA guide
ccuucccaaaguuacaaugu

SEQ ID NO: 98618 - RNA, 20 nt, Artificial Sequence
  LRRK2 RNA guide
ccuugcugcaauucuuaauu

SEQ ID NO: 98619 - RNA, 20 nt, Artificial Sequence
  LRRK2 RNA guide
ccuuggaacugaauucacaa

SEQ ID NO: 98620 - RNA, 20 nt, Artificial Sequence
  LRRK2 RNA guide
ccuuucuauaaaauaggcuc

SEQ ID NO: 98621 - RNA, 20 nt, Artificial Sequence
  LRRK2 RNA guide
cgagguaaugugugugaaaa

SEQ ID NO: 98622 - RNA, 20 nt, Artificial Sequence
  LRRK2 RNA guide
cguuuaacauuguaacuuug

SEQ ID NO: 98623 - RNA, 20 nt, Artificial Sequence
  LRRK2 RNA guide
cuaaguguccaucuaaauac

SEQ ID NO: 98624 - RNA, 20 nt, Artificial Sequence
  LRRK2 RNA guide
cuacauagaagacuuuugau

SEQ ID NO: 98625 - RNA, 20 nt, Artificial Sequence
  LRRK2 RNA guide
cuagggccuacauagaagac

SEQ ID NO: 98626 - RNA, 20 nt, Artificial Sequence
  LRRK2 RNA guide
cuaggugacccuucaauuau

SEQ ID NO: 98627 - RNA, 20 nt, Artificial Sequence
  LRRK2 RNA guide
cuauuuucuaggugacccuu

SEQ ID NO: 98628 - RNA, 20 nt, Artificial Sequence
  LRRK2 RNA guide
cucacauaauuaagaauugc

SEQ ID NO: 98629 - RNA, 20 nt, Artificial Sequence
  LRRK2 RNA guide
cucagacucacauaauuaag

SEQ ID NO: 98630 - RNA, 20 nt, Artificial Sequence
  LRRK2 RNA guide
cucaguauuuauacauuacc

SEQ ID NO: 98631 - RNA, 20 nt, Artificial Sequence
  LRRK2 RNA guide
cucauauuuguaccuuacca

SEQ ID NO: 98632 - RNA, 20 nt, Artificial Sequence
  LRRK2 RNA guide
cuccuugcugcaauucuuaa

SEQ ID NO: 98633 - RNA, 20 nt, Artificial Sequence
  LRRK2 RNA guide
cucguuuaacauuguaacuu

SEQ ID NO: 98634 - RNA, 20 nt, Artificial Sequence
  LRRK2 RNA guide
cugagaaaacagcuuaaccu

SEQ ID NO: 98635 - RNA, 20 nt, Artificial Sequence
  LRRK2 RNA guide
cugagccuauuuuauagaaa

SEQ ID NO: 98636 - RNA, 20 nt, Artificial Sequence
  LRRK2 RNA guide
cugcaauucuuaauuaugug

SEQ ID NO: 98637 - RNA, 20 nt, Artificial Sequence
  LRRK2 RNA guide
cugugauccacuccuugcug

SEQ ID NO: 98638 - RNA, 20 nt, Artificial Sequence
  LRRK2 RNA guide
cuguuuucucagacucacau

SEQ ID NO: 98639 - RNA, 20 nt, Artificial Sequence
  LRRK2 RNA guide
cuuaaccuuucuauaaaaua

SEQ ID NO: 98640 - RNA, 20 nt, Artificial Sequence
  LRRK2 RNA guide
cuuaauuaugugagucugag

SEQ ID NO: 98641 - RNA, 20 nt, Artificial Sequence
  LRRK2 RNA guide
cuuaccauauccaaagaacu

SEQ ID NO: 98642 - RNA, 20 nt, Artificial Sequence
  LRRK2 RNA guide
cuuagauggauggauauacu

SEQ ID NO: 98643 - RNA, 20 nt, Artificial Sequence
  LRRK2 RNA guide
cuucccaaaguuacaauguu

SEQ ID NO: 98644 - RNA, 20 nt, Artificial Sequence
  LRRK2 RNA guide
cuugcugcaauucuuaauua

SEQ ID NO: 98645 - RNA, 20 nt, Artificial Sequence
  LRRK2 RNA guide
cuuggaacugaauucacaau

SEQ ID NO: 98646 - RNA, 20 nt, Artificial Sequence
  LRRK2 RNA guide
cuuuggauaugguaagguac

SEQ ID NO: 98647 - RNA, 20 nt, Artificial Sequence
  LRRK2 RNA guide
cuuugggaaggguaauguau

SEQ ID NO: 98648 - RNA, 20 nt, Artificial Sequence
  LRRK2 RNA guide
cuuuucacacacauuaccuc

SEQ ID NO: 98649 - RNA, 20 nt, Artificial Sequence
  LRRK2 RNA guide
gaaaaguucuuuggauaugg

SEQ ID NO: 98650 - RNA, 20 nt, Artificial Sequence
  LRRK2 RNA guide
gaaagguuaagcuguuuucu

SEQ ID NO: 98651 - RNA, 20 nt, Artificial Sequence
  LRRK2 RNA guide
gaacuuuucacacacauuac

SEQ ID NO: 98652 - RNA, 20 nt, Artificial Sequence
  LRRK2 RNA guide
gaagacuuuugaugcaaauu

SEQ ID NO: 98653 - RNA, 20 nt, Artificial Sequence
  LRRK2 RNA guide
gaaggguaauguauaaauac

SEQ ID NO: 98654 - RNA, 20 nt, Artificial Sequence
  LRRK2 RNA guide
gaagggucaccuagaaaaua

SEQ ID NO: 98655 - RNA, 20 nt, Artificial Sequence
  LRRK2 RNA guide
gaauucaguuccaagguauu

SEQ ID NO: 98656 - RNA, 20 nt, Artificial Sequence
  LRRK2 RNA guide
gaauugcagcaaggagugga

SEQ ID NO: 98657 - RNA, 20 nt, Artificial Sequence
  LRRK2 RNA guide
gaauugugaauucaguucca

SEQ ID NO: 98658 - RNA, 20 nt, Artificial Sequence
  LRRK2 RNA guide
gacacaaauaccuuggaacu

SEQ ID NO: 98659 - RNA, 20 nt, Artificial Sequence
  LRRK2 RNA guide
gacacuuagauggauggaua

SEQ ID NO: 98660 - RNA, 20 nt, Artificial Sequence
  LRRK2 RNA guide
gacauaguaucaguauaucc

SEQ ID NO: 98661 - RNA, 20 nt, Artificial Sequence
  LRRK2 RNA guide
gacucacauaauuaagaauu

SEQ ID NO: 98662 - RNA, 20 nt, Artificial Sequence
  LRRK2 RNA guide
gagaaaacagcuuaaccuuu

SEQ ID NO: 98663 - RNA, 20 nt, Artificial Sequence
  LRRK2 RNA guide
gagccuauuuuauagaaagg

SEQ ID NO: 98664 - RNA, 20 nt, Artificial Sequence
  LRRK2 RNA guide
gagguaaugugugugaaaag

SEQ ID NO: 98665 - RNA, 20 nt, Artificial Sequence
  LRRK2 RNA guide
gaguauuuagauggacacuu

SEQ ID NO: 98666 - RNA, 20 nt, Artificial Sequence
  LRRK2 RNA guide
gagucugagaaaacagcuua

SEQ ID NO: 98667 - RNA, 20 nt, Artificial Sequence
  LRRK2 RNA guide
gaguggaucacagauuuugu

SEQ ID NO: 98668 - RNA, 20 nt, Artificial Sequence
  LRRK2 RNA guide
gauaugguaagguacaaaua

SEQ ID NO: 98669 - RNA, 20 nt, Artificial Sequence
  LRRK2 RNA guide
gauccacuccuugcugcaau

SEQ ID NO: 98670 - RNA, 20 nt, Artificial Sequence
  LRRK2 RNA guide
gauggacacuuagauggaug

SEQ ID NO: 98671 - RNA, 20 nt, Artificial Sequence
  LRRK2 RNA guide
gauggauauacugauacuau

SEQ ID NO: 98672 - RNA, 20 nt, Artificial Sequence
  LRRK2 RNA guide
gauggauggauauacugaua

SEQ ID NO: 98673 - RNA, 20 nt, Artificial Sequence
  LRRK2 RNA guide
gcaaggaguggaucacagau

SEQ ID NO: 98674 - RNA, 20 nt, Artificial Sequence
  LRRK2 RNA guide
gcaauucuuaauuaugugag

SEQ ID NO: 98675 - RNA, 20 nt, Artificial Sequence
  LRRK2 RNA guide
gcagcaaggaguggaucaca

SEQ ID NO: 98676 - RNA, 20 nt, Artificial Sequence
  LRRK2 RNA guide
gcaucaaaagucuucuaugu

SEQ ID NO: 98677 - RNA, 20 nt, Artificial Sequence
  LRRK2 RNA guide
gccuacauagaagacuuuug

SEQ ID NO: 98678 - RNA, 20 nt, Artificial Sequence
  LRRK2 RNA guide
gccuagggccuacauagaag

SEQ ID NO: 98679 - RNA, 20 nt, Artificial Sequence
  LRRK2 RNA guide
gccuauuuuauagaaagguu

SEQ ID NO: 98680 - RNA, 20 nt, Artificial Sequence
  LRRK2 RNA guide
gcucaguauuuauacauuac

SEQ ID NO: 98681 - RNA, 20 nt, Artificial Sequence
  LRRK2 RNA guide
gcugcaauucuuaauuaugu

SEQ ID NO: 98682 - RNA, 20 nt, Artificial Sequence
  LRRK2 RNA guide
gcuguuuucucagacucaca

SEQ ID NO: 98683 - RNA, 20 nt, Artificial Sequence
  LRRK2 RNA guide
gcuuaaccuuucuauaaaau

SEQ ID NO: 98684 - RNA, 20 nt, Artificial Sequence
  LRRK2 RNA guide
ggaaggguaauguauaaaua

SEQ ID NO: 98685 - RNA, 20 nt, Artificial Sequence
  LRRK2 RNA guide
ggacacuuagauggauggau

SEQ ID NO: 98686 - RNA, 20 nt, Artificial Sequence
  LRRK2 RNA guide
ggaguggaucacagauuuug

SEQ ID NO: 98687 - RNA, 20 nt, Artificial Sequence
  LRRK2 RNA guide
ggauaugguaagguacaaau

SEQ ID NO: 98688 - RNA, 20 nt, Artificial Sequence
  LRRK2 RNA guide
ggauggauauacugauacua

SEQ ID NO: 98689 - RNA, 20 nt, Artificial Sequence
  LRRK2 RNA guide
ggccuacauagaagacuuuu

SEQ ID NO: 98690 - RNA, 20 nt, Artificial Sequence
  LRRK2 RNA guide
ggcucaguauuuauacauua

SEQ ID NO: 98691 - RNA, 20 nt, Artificial Sequence
  LRRK2 RNA guide
gggaaggguaauguauaaau

SEQ ID NO: 98692 - RNA, 20 nt, Artificial Sequence
  LRRK2 RNA guide
gggccuacauagaagacuuu

SEQ ID NO: 98693 - RNA, 20 nt, Artificial Sequence
  LRRK2 RNA guide
ggguaauguauaaauacuga

SEQ ID NO: 98694 - RNA, 20 nt, Artificial Sequence
  LRRK2 RNA guide
gggucaccuagaaaauagaa

SEQ ID NO: 98695 - RNA, 20 nt, Artificial Sequence
  LRRK2 RNA guide
gguaauguauaaauacugag

SEQ ID NO: 98696 - RNA, 20 nt, Artificial Sequence
  LRRK2 RNA guide
gguaaugugugugaaaaguu

SEQ ID NO: 98697 - RNA, 20 nt, Artificial Sequence
  LRRK2 RNA guide
gguauuugugucuuaaacua

SEQ ID NO: 98698 - RNA, 20 nt, Artificial Sequence
  LRRK2 RNA guide
ggucaccuagaaaauagaau

SEQ ID NO: 98699 - RNA, 20 nt, Artificial Sequence
  LRRK2 RNA guide
ggugacccuucaauuauauu

SEQ ID NO: 98700 - RNA, 20 nt, Artificial Sequence
  LRRK2 RNA guide
gguuaagcuguuuucucaga

SEQ ID NO: 98701 - RNA, 20 nt, Artificial Sequence
  LRRK2 RNA guide
guaacuuugggaaggguaau

SEQ ID NO: 98702 - RNA, 20 nt, Artificial Sequence
  LRRK2 RNA guide
guaaugugugugaaaaguuc

SEQ ID NO: 98703 - RNA, 20 nt, Artificial Sequence
  LRRK2 RNA guide
guaccuuaccauauccaaag

SEQ ID NO: 98704 - RNA, 20 nt, Artificial Sequence
  LRRK2 RNA guide
guauauccauccaucuaagu

SEQ ID NO: 98705 - RNA, 20 nt, Artificial Sequence
  LRRK2 RNA guide
guaucaguauauccauccau

SEQ ID NO: 98706 - RNA, 20 nt, Artificial Sequence
  LRRK2 RNA guide
guauuuagauggacacuuag

SEQ ID NO: 98707 - RNA, 20 nt, Artificial Sequence
  LRRK2 RNA guide
guauuuauacauuacccuuc

SEQ ID NO: 98708 - RNA, 20 nt, Artificial Sequence
  LRRK2 RNA guide
gucaccuagaaaauagaauu

SEQ ID NO: 98709 - RNA, 20 nt, Artificial Sequence
  LRRK2 RNA guide
gucugagaaaacagcuuaac

SEQ ID NO: 98710 - RNA, 20 nt, Artificial Sequence
  LRRK2 RNA guide
gugaaaaguucuuuggauau

SEQ ID NO: 98711 - RNA, 20 nt, Artificial Sequence
  LRRK2 RNA guide
gugaauucaguuccaaggua

SEQ ID NO: 98712 - RNA, 20 nt, Artificial Sequence
  LRRK2 RNA guide
gugagucugagaaaacagcu

SEQ ID NO: 98713 - RNA, 20 nt, Artificial Sequence
  LRRK2 RNA guide
gugauccacuccuugcugca

SEQ ID NO: 98714 - RNA, 20 nt, Artificial Sequence
  LRRK2 RNA guide
guguccaucuaaauacucau

SEQ ID NO: 98715 - RNA, 20 nt, Artificial Sequence
  LRRK2 RNA guide
gugugaaaaguucuuuggau

SEQ ID NO: 98716 - RNA, 20 nt, Artificial Sequence
  LRRK2 RNA guide
gugugugaaaaguucuuugg

SEQ ID NO: 98717 - RNA, 20 nt, Artificial Sequence
  LRRK2 RNA guide
guuaaacgagguaaugugug

SEQ ID NO: 98718 - RNA, 20 nt, Artificial Sequence
  LRRK2 RNA guide
guuaagcuguuuucucagac

SEQ ID NO: 98719 - RNA, 20 nt, Artificial Sequence
  LRRK2 RNA guide
guuacaauguuaaacgaggu

SEQ ID NO: 98720 - RNA, 20 nt, Artificial Sequence
  LRRK2 RNA guide
guucauaguuuaagacacaa

SEQ ID NO: 98721 - RNA, 20 nt, Artificial Sequence
  LRRK2 RNA guide
guuccaagguauuugugucu

SEQ ID NO: 98722 - RNA, 20 nt, Artificial Sequence
  LRRK2 RNA guide
guucuuuggauaugguaagg

SEQ ID NO: 98723 - RNA, 20 nt, Artificial Sequence
  LRRK2 RNA guide
guuuaacauuguaacuuugg

SEQ ID NO: 98724 - RNA, 20 nt, Artificial Sequence
  LRRK2 RNA guide
guuuaagacacaaauaccuu

SEQ ID NO: 98725 - RNA, 20 nt, Artificial Sequence
  LRRK2 RNA guide
guuuucucagacucacauaa

SEQ ID NO: 98726 - RNA, 20 nt, Artificial Sequence
  LRRK2 RNA guide
uaaacgagguaaugugugug

SEQ ID NO: 98727 - RNA, 20 nt, Artificial Sequence
  LRRK2 RNA guide
uaacaaaaucugugauccac

SEQ ID NO: 98728 - RNA, 20 nt, Artificial Sequence
  LRRK2 RNA guide
uaacauuguaacuuugggaa

SEQ ID NO: 98729 - RNA, 20 nt, Artificial Sequence
  LRRK2 RNA guide
uaaccuuucuauaaaauagg

SEQ ID NO: 98730 - RNA, 20 nt, Artificial Sequence
  LRRK2 RNA guide
uaacuuugggaaggguaaug

SEQ ID NO: 98731 - RNA, 20 nt, Artificial Sequence
  LRRK2 RNA guide
uaagaauugcagcaaggagu

SEQ ID NO: 98732 - RNA, 20 nt, Artificial Sequence
  LRRK2 RNA guide
uaagacacaaauaccuugga

SEQ ID NO: 98733 - RNA, 20 nt, Artificial Sequence
  LRRK2 RNA guide
uaagcuguuuucucagacuc

SEQ ID NO: 98734 - RNA, 20 nt, Artificial Sequence
  LRRK2 RNA guide
uaaugugugugaaaaguucu

SEQ ID NO: 98735 - RNA, 20 nt, Artificial Sequence
  LRRK2 RNA guide
uaauuaagaauugcagcaag

SEQ ID NO: 98736 - RNA, 20 nt, Artificial Sequence
  LRRK2 RNA guide
uaauuaugugagucugagaa

SEQ ID NO: 98737 - RNA, 20 nt, Artificial Sequence
  LRRK2 RNA guide
uaauugaagggucaccuaga

SEQ ID NO: 98738 - RNA, 20 nt, Artificial Sequence
  LRRK2 RNA guide
uacaauguuaaacgagguaa

SEQ ID NO: 98739 - RNA, 20 nt, Artificial Sequence
  LRRK2 RNA guide
uacauuacccuucccaaagu

SEQ ID NO: 98740 - RNA, 20 nt, Artificial Sequence
  LRRK2 RNA guide
uaccauauccaaagaacuuu

SEQ ID NO: 98741 - RNA, 20 nt, Artificial Sequence
  LRRK2 RNA guide
uacccuucccaaaguuacaa

SEQ ID NO: 98742 - RNA, 20 nt, Artificial Sequence
  LRRK2 RNA guide
uaccucguuuaacauuguaa

SEQ ID NO: 98743 - RNA, 20 nt, Artificial Sequence
  LRRK2 RNA guide
uaccuuaccauauccaaaga

SEQ ID NO: 98744 - RNA, 20 nt, Artificial Sequence
  LRRK2 RNA guide
uaccuuggaacugaauucac

SEQ ID NO: 98745 - RNA, 20 nt, Artificial Sequence
  LRRK2 RNA guide
uacugagccuauuuuauaga

SEQ ID NO: 98746 - RNA, 20 nt, Artificial Sequence
  LRRK2 RNA guide
uagaaagguuaagcuguuuu

SEQ ID NO: 98747 - RNA, 20 nt, Artificial Sequence
  LRRK2 RNA guide
uagaauugugaauucaguuc

SEQ ID NO: 98748 - RNA, 20 nt, Artificial Sequence
  LRRK2 RNA guide
uagauggacacuuagaugga

SEQ ID NO: 98749 - RNA, 20 nt, Artificial Sequence
  LRRK2 RNA guide
uagauggauggauauacuga

SEQ ID NO: 98750 - RNA, 20 nt, Artificial Sequence
  LRRK2 RNA guide
uaggcucaguauuuauacau

SEQ ID NO: 98751 - RNA, 20 nt, Artificial Sequence
  LRRK2 RNA guide
uagggccuacauagaagacu

SEQ ID NO: 98752 - RNA, 20 nt, Artificial Sequence
  LRRK2 RNA guide
uaggugacccuucaauuaua

SEQ ID NO: 98753 - RNA, 20 nt, Artificial Sequence
  LRRK2 RNA guide
uaguaucaguauauccaucc

SEQ ID NO: 98754 - RNA, 20 nt, Artificial Sequence
  LRRK2 RNA guide
uaguuuaagacacaaauacc

SEQ ID NO: 98755 - RNA, 20 nt, Artificial Sequence
  LRRK2 RNA guide
uauaauugaagggucaccua

SEQ ID NO: 98756 - RNA, 20 nt, Artificial Sequence
  LRRK2 RNA guide
uauacauuacccuucccaaa

SEQ ID NO: 98757 - RNA, 20 nt, Artificial Sequence
  LRRK2 RNA guide
uauagaaagguuaagcuguu

SEQ ID NO: 98758 - RNA, 20 nt, Artificial Sequence
  LRRK2 RNA guide
uauauccauccaucuaagug

SEQ ID NO: 98759 - RNA, 20 nt, Artificial Sequence
  LRRK2 RNA guide
uaucaguauauccauccauc

SEQ ID NO: 98760 - RNA, 20 nt, Artificial Sequence
  LRRK2 RNA guide
uauccaaagaacuuuucaca

SEQ ID NO: 98761 - RNA, 20 nt, Artificial Sequence
  LRRK2 RNA guide
uauccauccaucuaaguguc

SEQ ID NO: 98762 - RNA, 20 nt, Artificial Sequence
  LRRK2 RNA guide
uaugaguauuuagauggaca

SEQ ID NO: 98763 - RNA, 20 nt, Artificial Sequence
  LRRK2 RNA guide
uaugugagucugagaaaaca

SEQ ID NO: 98764 - RNA, 20 nt, Artificial Sequence
  LRRK2 RNA guide
uauucaauauaauugaaggg

SEQ ID NO: 98765 - RNA, 20 nt, Artificial Sequence
  LRRK2 RNA guide
uauuuagauggacacuuaga

SEQ ID NO: 98766 - RNA, 20 nt, Artificial Sequence
  LRRK2 RNA guide
uauuuauacauuacccuucc

SEQ ID NO: 98767 - RNA, 20 nt, Artificial Sequence
  LRRK2 RNA guide
uauuuguaccuuaccauauc

SEQ ID NO: 98768 - RNA, 20 nt, Artificial Sequence
  LRRK2 RNA guide
uauuuucuaggugacccuuc

SEQ ID NO: 98769 - RNA, 20 nt, Artificial Sequence
  LRRK2 RNA guide
ucaaaagucuucuauguagg

SEQ ID NO: 98770 - RNA, 20 nt, Artificial Sequence
  LRRK2 RNA guide
ucaauauaauugaaggguca

SEQ ID NO: 98771 - RNA, 20 nt, Artificial Sequence
  LRRK2 RNA guide
ucacaauucuauuuucuagg

SEQ ID NO: 98772 - RNA, 20 nt, Artificial Sequence
  LRRK2 RNA guide
ucacacacauuaccucguuu

SEQ ID NO: 98773 - RNA, 20 nt, Artificial Sequence
  LRRK2 RNA guide
ucacauaauuaagaauugca

SEQ ID NO: 98774 - RNA, 20 nt, Artificial Sequence
  LRRK2 RNA guide
ucagacucacauaauuaaga

SEQ ID NO: 98775 - RNA, 20 nt, Artificial Sequence
  LRRK2 RNA guide
ucaguauauccauccaucua

SEQ ID NO: 98776 - RNA, 20 nt, Artificial Sequence
  LRRK2 RNA guide
ucaguauuuauacauuaccc

SEQ ID NO: 98777 - RNA, 20 nt, Artificial Sequence
  LRRK2 RNA guide
ucaguuccaagguauuugug

SEQ ID NO: 98778 - RNA, 20 nt, Artificial Sequence
  LRRK2 RNA guide
ucauauuuguaccuuaccau

SEQ ID NO: 98779 - RNA, 20 nt, Artificial Sequence
  LRRK2 RNA guide
uccaaagaacuuuucacaca

SEQ ID NO: 98780 - RNA, 20 nt, Artificial Sequence
  LRRK2 RNA guide
uccaagguauuugugucuua

SEQ ID NO: 98781 - RNA, 20 nt, Artificial Sequence
  LRRK2 RNA guide
uccacuccuugcugcaauuc

SEQ ID NO: 98782 - RNA, 20 nt, Artificial Sequence
  LRRK2 RNA guide
uccauccaucuaagugucca

SEQ ID NO: 98783 - RNA, 20 nt, Artificial Sequence
  LRRK2 RNA guide
uccaucuaaguguccaucua

SEQ ID NO: 98784 - RNA, 20 nt, Artificial Sequence
  LRRK2 RNA guide
ucccaaaguuacaauguuaa

SEQ ID NO: 98785 - RNA, 20 nt, Artificial Sequence
  LRRK2 RNA guide
uccuugcugcaauucuuaau

SEQ ID NO: 98786 - RNA, 20 nt, Artificial Sequence
  LRRK2 RNA guide
ucguuuaacauuguaacuuu

SEQ ID NO: 98787 - RNA, 20 nt, Artificial Sequence
  LRRK2 RNA guide
ucuaaguguccaucuaaaua

SEQ ID NO: 98788 - RNA, 20 nt, Artificial Sequence
  LRRK2 RNA guide
ucuaggugacccuucaauua

SEQ ID NO: 98789 - RNA, 20 nt, Artificial Sequence
  LRRK2 RNA guide
ucuauuuucuaggugacccu

SEQ ID NO: 98790 - RNA, 20 nt, Artificial Sequence
  LRRK2 RNA guide
ucugagaaaacagcuuaacc

SEQ ID NO: 98791 - RNA, 20 nt, Artificial Sequence
  LRRK2 RNA guide
ucugugauccacuccuugcu

SEQ ID NO: 98792 - RNA, 20 nt, Artificial Sequence
  LRRK2 RNA guide
ucuuuggauaugguaaggua

SEQ ID NO: 98793 - RNA, 20 nt, Artificial Sequence
  LRRK2 RNA guide
ugaaaaguucuuuggauaug

SEQ ID NO: 98794 - RNA, 20 nt, Artificial Sequence
  LRRK2 RNA guide
ugaagggucaccuagaaaau

SEQ ID NO: 98795 - RNA, 20 nt, Artificial Sequence
  LRRK2 RNA guide
ugaauucaguuccaagguau

SEQ ID NO: 98796 - RNA, 20 nt, Artificial Sequence
  LRRK2 RNA guide
ugacauaguaucaguauauc

SEQ ID NO: 98797 - RNA, 20 nt, Artificial Sequence
  LRRK2 RNA guide
ugagaaaacagcuuaaccuu

SEQ ID NO: 98798 - RNA, 20 nt, Artificial Sequence
  LRRK2 RNA guide
ugaguauuuagauggacacu

SEQ ID NO: 98799 - RNA, 20 nt, Artificial Sequence
  LRRK2 RNA guide
ugagucugagaaaacagcuu

SEQ ID NO: 98800 - RNA, 20 nt, Artificial Sequence
  LRRK2 RNA guide
ugauccacuccuugcugcaa

SEQ ID NO: 98801 - RNA, 20 nt, Artificial Sequence
  LRRK2 RNA guide
ugcaauucuuaauuauguga

SEQ ID NO: 98802 - RNA, 20 nt, Artificial Sequence
  LRRK2 RNA guide
ugcagcaaggaguggaucac

SEQ ID NO: 98803 - RNA, 20 nt, Artificial Sequence
  LRRK2 RNA guide
ugcaucaaaagucuucuaug

SEQ ID NO: 98804 - RNA, 20 nt, Artificial Sequence
  LRRK2 RNA guide
ugcugcaauucuuaauuaug

SEQ ID NO: 98805 - RNA, 20 nt, Artificial Sequence
  LRRK2 RNA guide
uggacacuuagauggaugga

SEQ ID NO: 98806 - RNA, 20 nt, Artificial Sequence
  LRRK2 RNA guide
uggauaugguaagguacaaa

SEQ ID NO: 98807 - RNA, 20 nt, Artificial Sequence
  LRRK2 RNA guide
uggauggauauacugauacu

SEQ ID NO: 98808 - RNA, 20 nt, Artificial Sequence
  LRRK2 RNA guide
ugggaaggguaauguauaaa

SEQ ID NO: 98809 - RNA, 20 nt, Artificial Sequence
  LRRK2 RNA guide
uguaacuuugggaaggguaa

SEQ ID NO: 98810 - RNA, 20 nt, Artificial Sequence
  LRRK2 RNA guide
uguaccuuaccauauccaaa

SEQ ID NO: 98811 - RNA, 20 nt, Artificial Sequence
  LRRK2 RNA guide
ugugaaaaguucuuuggaua

SEQ ID NO: 98812 - RNA, 20 nt, Artificial Sequence
  LRRK2 RNA guide
ugugaauucaguuccaaggu

SEQ ID NO: 98813 - RNA, 20 nt, Artificial Sequence
  LRRK2 RNA guide
ugugagucugagaaaacagc

SEQ ID NO: 98814 - RNA, 20 nt, Artificial Sequence
  LRRK2 RNA guide
ugugauccacuccuugcugc

SEQ ID NO: 98815 - RNA, 20 nt, Artificial Sequence
  LRRK2 RNA guide
ugugugaaaaguucuuugga

SEQ ID NO: 98816 - RNA, 20 nt, Artificial Sequence
  LRRK2 RNA guide
ugugugugaaaaguucuuug

SEQ ID NO: 98817 - RNA, 20 nt, Artificial Sequence
  LRRK2 RNA guide
uguuaaacgagguaaugugu

SEQ ID NO: 98818 - RNA, 20 nt, Artificial Sequence
  LRRK2 RNA guide
uuaacauuguaacuuuggga

SEQ ID NO: 98819 - RNA, 20 nt, Artificial Sequence
  LRRK2 RNA guide
uuaagaauugcagcaaggag

SEQ ID NO: 98820 - RNA, 20 nt, Artificial Sequence
  LRRK2 RNA guide
uuaagacacaaauaccuugg

SEQ ID NO: 98821 - RNA, 20 nt, Artificial Sequence
  LRRK2 RNA guide
uuaagcuguuuucucagacu

SEQ ID NO: 98822 - RNA, 20 nt, Artificial Sequence
  LRRK2 RNA guide
uuacaauguuaaacgaggua

SEQ ID NO: 98823 - RNA, 20 nt, Artificial Sequence
  LRRK2 RNA guide
uuaccauauccaaagaacuu

SEQ ID NO: 98824 - RNA, 20 nt, Artificial Sequence
  LRRK2 RNA guide
uuacccuucccaaaguuaca

SEQ ID NO: 98825 - RNA, 20 nt, Artificial Sequence
  LRRK2 RNA guide
uuagauggacacuuagaugg

SEQ ID NO: 98826 - RNA, 20 nt, Artificial Sequence
  LRRK2 RNA guide
uuagauggauggauauacug

SEQ ID NO: 98827 - RNA, 20 nt, Artificial Sequence
  LRRK2 RNA guide
uuauacauuacccuucccaa

SEQ ID NO: 98828 - RNA, 20 nt, Artificial Sequence
  LRRK2 RNA guide
uuaugugagucugagaaaac

SEQ ID NO: 98829 - RNA, 20 nt, Artificial Sequence
  LRRK2 RNA guide
uucaauauaauugaaggguc

SEQ ID NO: 98830 - RNA, 20 nt, Artificial Sequence
  LRRK2 RNA guide
uucacaauucuauuuucuag

SEQ ID NO: 98831 - RNA, 20 nt, Artificial Sequence
  LRRK2 RNA guide
uucacacacauuaccucguu

SEQ ID NO: 98832 - RNA, 20 nt, Artificial Sequence
  LRRK2 RNA guide
uucaguuccaagguauuugu

SEQ ID NO: 98833 - RNA, 20 nt, Artificial Sequence
  LRRK2 RNA guide
uuccaagguauuugugucuu

SEQ ID NO: 98834 - RNA, 20 nt, Artificial Sequence
  LRRK2 RNA guide
uucccaaaguuacaauguua

SEQ ID NO: 98835 - RNA, 20 nt, Artificial Sequence
  LRRK2 RNA guide
uucuaggugacccuucaauu

SEQ ID NO: 98836 - RNA, 20 nt, Artificial Sequence
  LRRK2 RNA guide
uucuauuuucuaggugaccc

SEQ ID NO: 98837 - RNA, 20 nt, Artificial Sequence
  LRRK2 RNA guide
uucuuuggauaugguaaggu

SEQ ID NO: 98838 - RNA, 20 nt, Artificial Sequence
  LRRK2 RNA guide
uugaagggucaccuagaaaa

SEQ ID NO: 98839 - RNA, 20 nt, Artificial Sequence
  LRRK2 RNA guide
uugacauaguaucaguauau

SEQ ID NO: 98840 - RNA, 20 nt, Artificial Sequence
  LRRK2 RNA guide
uugcagcaaggaguggauca

SEQ ID NO: 98841 - RNA, 20 nt, Artificial Sequence
  LRRK2 RNA guide
uugcaucaaaagucuucuau

SEQ ID NO: 98842 - RNA, 20 nt, Artificial Sequence
  LRRK2 RNA guide
uugcugcaauucuuaauuau

SEQ ID NO: 98843 - RNA, 20 nt, Artificial Sequence
  LRRK2 RNA guide
uuggauaugguaagguacaa

SEQ ID NO: 98844 - RNA, 20 nt, Artificial Sequence
  LRRK2 RNA guide
uugggaaggguaauguauaa

SEQ ID NO: 98845 - RNA, 20 nt, Artificial Sequence
  LRRK2 RNA guide
uuguaacuuugggaagggua

SEQ ID NO: 98846 - RNA, 20 nt, Artificial Sequence
  LRRK2 RNA guide
uuguaccuuaccauauccaa

SEQ ID NO: 98847 - RNA, 20 nt, Artificial Sequence
  LRRK2 RNA guide
uugugaauucaguuccaagg

SEQ ID NO: 98848 - RNA, 20 nt, Artificial Sequence
  LRRK2 RNA guide
uuuaacauuguaacuuuggg

SEQ ID NO: 98849 - RNA, 20 nt, Artificial Sequence
  LRRK2 RNA guide
uuuaagacacaaauaccuug

SEQ ID NO: 98850 - RNA, 20 nt, Artificial Sequence
  LRRK2 RNA guide
uuuagauggacacuuagaug

SEQ ID NO: 98851 - RNA, 20 nt, Artificial Sequence
  LRRK2 RNA guide
uuuauacauuacccuuccca

SEQ ID NO: 98852 - RNA, 20 nt, Artificial Sequence
  LRRK2 RNA guide
uuucacacacauuaccucgu

SEQ ID NO: 98853 - RNA, 20 nt, Artificial Sequence
  LRRK2 RNA guide
uuucuaggugacccuucaau

SEQ ID NO: 98854 - RNA, 20 nt, Artificial Sequence
  LRRK2 RNA guide
uuugcaucaaaagucuucua

SEQ ID NO: 98855 - RNA, 20 nt, Artificial Sequence
  LRRK2 RNA guide
uuugggaaggguaauguaua

SEQ ID NO: 98856 - RNA, 20 nt, Artificial Sequence
  LRRK2 RNA guide
uuuguaccuuaccauaucca

SEQ ID NO: 98857 - RNA, 20 nt, Artificial Sequence
  LRRK2 RNA guide
uuuucacacacauuaccucg

SEQ ID NO: 98858 - RNA, 21 nt, Artificial Sequence
  LRRK2 RNA guide
aaaagucuucuauguaggccc

SEQ ID NO: 98859 - RNA, 21 nt, Artificial Sequence
  LRRK2 RNA guide
aaaaguucuuuggauauggua

SEQ ID NO: 98860 - RNA, 21 nt, Artificial Sequence
  LRRK2 RNA guide
aaaauaacaaaaucugugauc

SEQ ID NO: 98861 - RNA, 21 nt, Artificial Sequence
  LRRK2 RNA guide
aaaaucugugauccacuccuu

SEQ ID NO: 98862 - RNA, 21 nt, Artificial Sequence
  LRRK2 RNA guide
aaacgagguaaugugugugaa

SEQ ID NO: 98863 - RNA, 21 nt, Artificial Sequence
  LRRK2 RNA guide
aaagaacuuuucacacacauu

SEQ ID NO: 98864 - RNA, 21 nt, Artificial Sequence
  LRRK2 RNA guide
aaagguuaagcuguuuucuca

SEQ ID NO: 98865 - RNA, 21 nt, Artificial Sequence
  LRRK2 RNA guide
aaaguucuuuggauaugguaa

SEQ ID NO: 98866 - RNA, 21 nt, Artificial Sequence
  LRRK2 RNA guide
aaauaacaaaaucugugaucc

SEQ ID NO: 98867 - RNA, 21 nt, Artificial Sequence
  LRRK2 RNA guide
aaauaccuuggaacugaauuc

SEQ ID NO: 98868 - RNA, 21 nt, Artificial Sequence
  LRRK2 RNA guide
aaaucugugauccacuccuug

SEQ ID NO: 98869 - RNA, 21 nt, Artificial Sequence
  LRRK2 RNA guide
aacaaaaucugugauccacuc

SEQ ID NO: 98870 - RNA, 21 nt, Artificial Sequence
  LRRK2 RNA guide
aacauuguaacuuugggaagg

SEQ ID NO: 98871 - RNA, 21 nt, Artificial Sequence
  LRRK2 RNA guide
aaccuuucuauaaaauaggcu

SEQ ID NO: 98872 - RNA, 21 nt, Artificial Sequence
  LRRK2 RNA guide
aacgagguaaugugugugaaa

SEQ ID NO: 98873 - RNA, 21 nt, Artificial Sequence
  LRRK2 RNA guide
aacuuugggaaggguaaugua

SEQ ID NO: 98874 - RNA, 21 nt, Artificial Sequence
  LRRK2 RNA guide
aacuuuucacacacauuaccu

SEQ ID NO: 98875 - RNA, 21 nt, Artificial Sequence
  LRRK2 RNA guide
aagaacuuuucacacacauua

SEQ ID NO: 98876 - RNA, 21 nt, Artificial Sequence
  LRRK2 RNA guide
aagaauugcagcaaggagugg

SEQ ID NO: 98877 - RNA, 21 nt, Artificial Sequence
  LRRK2 RNA guide
aagacacaaauaccuuggaac

SEQ ID NO: 98878 - RNA, 21 nt, Artificial Sequence
  LRRK2 RNA guide
aagcuguuuucucagacucac

SEQ ID NO: 98879 - RNA, 21 nt, Artificial Sequence
  LRRK2 RNA guide
aaggaguggaucacagauuuu

SEQ ID NO: 98880 - RNA, 21 nt, Artificial Sequence
  LRRK2 RNA guide
aaggguaauguauaaauacug

SEQ ID NO: 98881 - RNA, 21 nt, Artificial Sequence
  LRRK2 RNA guide
aagggucaccuagaaaauaga

SEQ ID NO: 98882 - RNA, 21 nt, Artificial Sequence
  LRRK2 RNA guide
aagguuaagcuguuuucucag

SEQ ID NO: 98883 - RNA, 21 nt, Artificial Sequence
  LRRK2 RNA guide
aaguuacaauguuaaacgagg

SEQ ID NO: 98884 - RNA, 21 nt, Artificial Sequence
  LRRK2 RNA guide
aaguucuuuggauaugguaag

SEQ ID NO: 98885 - RNA, 21 nt, Artificial Sequence
  LRRK2 RNA guide
aauaacaaaaucugugaucca

SEQ ID NO: 98886 - RNA, 21 nt, Artificial Sequence
  LRRK2 RNA guide
aauaccuuggaacugaauuca

SEQ ID NO: 98887 - RNA, 21 nt, Artificial Sequence
  LRRK2 RNA guide
aauacugagccuauuuuauag

SEQ ID NO: 98888 - RNA, 21 nt, Artificial Sequence
  LRRK2 RNA guide
aauagaauugugaauucaguu

SEQ ID NO: 98889 - RNA, 21 nt, Artificial Sequence
  LRRK2 RNA guide
aauaggcucaguauuuauaca

SEQ ID NO: 98890 - RNA, 21 nt, Artificial Sequence
  LRRK2 RNA guide
aauauaauugaagggucaccu

SEQ ID NO: 98891 - RNA, 21 nt, Artificial Sequence
  LRRK2 RNA guide
aaucugugauccacuccuugc

SEQ ID NO: 98892 - RNA, 21 nt, Artificial Sequence
  LRRK2 RNA guide
aaugugugugaaaaguucuuu

SEQ ID NO: 98893 - RNA, 21 nt, Artificial Sequence
  LRRK2 RNA guide
aauguuaaacgagguaaugug

SEQ ID NO: 98894 - RNA, 21 nt, Artificial Sequence
  LRRK2 RNA guide
aauuaagaauugcagcaagga

SEQ ID NO: 98895 - RNA, 21 nt, Artificial Sequence
  LRRK2 RNA guide
aauuaugugagucugagaaaa

SEQ ID NO: 98896 - RNA, 21 nt, Artificial Sequence
  LRRK2 RNA guide
aauucaguuccaagguauuug

SEQ ID NO: 98897 - RNA, 21 nt, Artificial Sequence
  LRRK2 RNA guide
aauucuauuuucuaggugacc

SEQ ID NO: 98898 - RNA, 21 nt, Artificial Sequence
  LRRK2 RNA guide
aauugaagggucaccuagaaa

SEQ ID NO: 98899 - RNA, 21 nt, Artificial Sequence
  LRRK2 RNA guide
aauugcagcaaggaguggauc

SEQ ID NO: 98900 - RNA, 21 nt, Artificial Sequence
  LRRK2 RNA guide
aauugugaauucaguuccaag

SEQ ID NO: 98901 - RNA, 21 nt, Artificial Sequence
  LRRK2 RNA guide
acaaaaucugugauccacucc

SEQ ID NO: 98902 - RNA, 21 nt, Artificial Sequence
  LRRK2 RNA guide
acaaauaccuuggaacugaau

SEQ ID NO: 98903 - RNA, 21 nt, Artificial Sequence
  LRRK2 RNA guide
acaaauaugaguauuuagaug

SEQ ID NO: 98904 - RNA, 21 nt, Artificial Sequence
  LRRK2 RNA guide
acaauguuaaacgagguaaug

SEQ ID NO: 98905 - RNA, 21 nt, Artificial Sequence
  LRRK2 RNA guide
acaauucuauuuucuagguga

SEQ ID NO: 98906 - RNA, 21 nt, Artificial Sequence
  LRRK2 RNA guide
acacaaauaccuuggaacuga

SEQ ID NO: 98907 - RNA, 21 nt, Artificial Sequence
  LRRK2 RNA guide
acacacauuaccucguuuaac

SEQ ID NO: 98908 - RNA, 21 nt, Artificial Sequence
  LRRK2 RNA guide
acacauuaccucguuuaacau

SEQ ID NO: 98909 - RNA, 21 nt, Artificial Sequence
  LRRK2 RNA guide
acacuuagauggauggauaua

SEQ ID NO: 98910 - RNA, 21 nt, Artificial Sequence
  LRRK2 RNA guide
acagcuuaaccuuucuauaaa

SEQ ID NO: 98911 - RNA, 21 nt, Artificial Sequence
  LRRK2 RNA guide
acauaauuaagaauugcagca

SEQ ID NO: 98912 - RNA, 21 nt, Artificial Sequence
  LRRK2 RNA guide
acauaguaucaguauauccau

SEQ ID NO: 98913 - RNA, 21 nt, Artificial Sequence
  LRRK2 RNA guide
acauuacccuucccaaaguua

SEQ ID NO: 98914 - RNA, 21 nt, Artificial Sequence
  LRRK2 RNA guide
acauuaccucguuuaacauug

SEQ ID NO: 98915 - RNA, 21 nt, Artificial Sequence
  LRRK2 RNA guide
acauuguaacuuugggaaggg

SEQ ID NO: 98916 - RNA, 21 nt, Artificial Sequence
  LRRK2 RNA guide
accauauccaaagaacuuuuc

SEQ ID NO: 98917 - RNA, 21 nt, Artificial Sequence
  LRRK2 RNA guide
acccuucccaaaguuacaaug

SEQ ID NO: 98918 - RNA, 21 nt, Artificial Sequence
  LRRK2 RNA guide
accucguuuaacauuguaacu

SEQ ID NO: 98919 - RNA, 21 nt, Artificial Sequence
  LRRK2 RNA guide
accuuaccauauccaaagaac

SEQ ID NO: 98920 - RNA, 21 nt, Artificial Sequence
  LRRK2 RNA guide
accuuggaacugaauucacaa

SEQ ID NO: 98921 - RNA, 21 nt, Artificial Sequence
  LRRK2 RNA guide
accuuucuauaaaauaggcuc

SEQ ID NO: 98922 - RNA, 21 nt, Artificial Sequence
  LRRK2 RNA guide
acgagguaaugugugugaaaa

SEQ ID NO: 98923 - RNA, 21 nt, Artificial Sequence
  LRRK2 RNA guide
acucacauaauuaagaauugc

SEQ ID NO: 98924 - RNA, 21 nt, Artificial Sequence
  LRRK2 RNA guide
acucauauuuguaccuuacca

SEQ ID NO: 98925 - RNA, 21 nt, Artificial Sequence
  LRRK2 RNA guide
acuccuugcugcaauucuuaa

SEQ ID NO: 98926 - RNA, 21 nt, Artificial Sequence
  LRRK2 RNA guide
acugagccuauuuuauagaaa

SEQ ID NO: 98927 - RNA, 21 nt, Artificial Sequence
  LRRK2 RNA guide
acuuagauggauggauauacu

SEQ ID NO: 98928 - RNA, 21 nt, Artificial Sequence
  LRRK2 RNA guide
acuuugggaaggguaauguau

SEQ ID NO: 98929 - RNA, 21 nt, Artificial Sequence
  LRRK2 RNA guide
acuuuucacacacauuaccuc

SEQ ID NO: 98930 - RNA, 21 nt, Artificial Sequence
  LRRK2 RNA guide
agaaagguuaagcuguuuucu

SEQ ID NO: 98931 - RNA, 21 nt, Artificial Sequence
  LRRK2 RNA guide
agaacuuuucacacacauuac

SEQ ID NO: 98932 - RNA, 21 nt, Artificial Sequence
  LRRK2 RNA guide
agaagacuuuugaugcaaauu

SEQ ID NO: 98933 - RNA, 21 nt, Artificial Sequence
  LRRK2 RNA guide
agaauugcagcaaggagugga

SEQ ID NO: 98934 - RNA, 21 nt, Artificial Sequence
  LRRK2 RNA guide
agaauugugaauucaguucca

SEQ ID NO: 98935 - RNA, 21 nt, Artificial Sequence
  LRRK2 RNA guide
agacacaaauaccuuggaacu

SEQ ID NO: 98936 - RNA, 21 nt, Artificial Sequence
  LRRK2 RNA guide
agacucacauaauuaagaauu

SEQ ID NO: 98937 - RNA, 21 nt, Artificial Sequence
  LRRK2 RNA guide
agauggacacuuagauggaug

SEQ ID NO: 98938 - RNA, 21 nt, Artificial Sequence
  LRRK2 RNA guide
agauggauggauauacugaua

SEQ ID NO: 98939 - RNA, 21 nt, Artificial Sequence
  LRRK2 RNA guide
agcaaggaguggaucacagau

SEQ ID NO: 98940 - RNA, 21 nt, Artificial Sequence
  LRRK2 RNA guide
agccuauuuuauagaaagguu

SEQ ID NO: 98941 - RNA, 21 nt, Artificial Sequence
  LRRK2 RNA guide
agcuguuuucucagacucaca

SEQ ID NO: 98942 - RNA, 21 nt, Artificial Sequence
  LRRK2 RNA guide
agcuuaaccuuucuauaaaau

SEQ ID NO: 98943 - RNA, 21 nt, Artificial Sequence
  LRRK2 RNA guide
aggaguggaucacagauuuug

SEQ ID NO: 98944 - RNA, 21 nt, Artificial Sequence
  LRRK2 RNA guide
aggcucaguauuuauacauua

SEQ ID NO: 98945 - RNA, 21 nt, Artificial Sequence
  LRRK2 RNA guide
agggccuacauagaagacuuu

SEQ ID NO: 98946 - RNA, 21 nt, Artificial Sequence
  LRRK2 RNA guide
aggguaauguauaaauacuga

SEQ ID NO: 98947 - RNA, 21 nt, Artificial Sequence
  LRRK2 RNA guide
agggucaccuagaaaauagaa

SEQ ID NO: 98948 - RNA, 21 nt, Artificial Sequence
  LRRK2 RNA guide
agguaaugugugugaaaaguu

SEQ ID NO: 98949 - RNA, 21 nt, Artificial Sequence
  LRRK2 RNA guide
agguauuugugucuuaaacua

SEQ ID NO: 98950 - RNA, 21 nt, Artificial Sequence
  LRRK2 RNA guide
aggugacccuucaauuauauu

SEQ ID NO: 98951 - RNA, 21 nt, Artificial Sequence
  LRRK2 RNA guide
agguuaagcuguuuucucaga

SEQ ID NO: 98952 - RNA, 21 nt, Artificial Sequence
  LRRK2 RNA guide
aguauauccauccaucuaagu

SEQ ID NO: 98953 - RNA, 21 nt, Artificial Sequence
  LRRK2 RNA guide
aguaucaguauauccauccau

SEQ ID NO: 98954 - RNA, 21 nt, Artificial Sequence
  LRRK2 RNA guide
aguauuuagauggacacuuag

SEQ ID NO: 98955 - RNA, 21 nt, Artificial Sequence
  LRRK2 RNA guide
aguauuuauacauuacccuuc

SEQ ID NO: 98956 - RNA, 21 nt, Artificial Sequence
  LRRK2 RNA guide
agucugagaaaacagcuuaac

SEQ ID NO: 98957 - RNA, 21 nt, Artificial Sequence
  LRRK2 RNA guide
aguguccaucuaaauacucau

SEQ ID NO: 98958 - RNA, 21 nt, Artificial Sequence
  LRRK2 RNA guide
aguuacaauguuaaacgaggu

SEQ ID NO: 98959 - RNA, 21 nt, Artificial Sequence
  LRRK2 RNA guide
aguuccaagguauuugugucu

SEQ ID NO: 98960 - RNA, 21 nt, Artificial Sequence
  LRRK2 RNA guide
aguucuuuggauaugguaagg

SEQ ID NO: 98961 - RNA, 21 nt, Artificial Sequence
  LRRK2 RNA guide
aguuuaagacacaaauaccuu

SEQ ID NO: 98962 - RNA, 21 nt, Artificial Sequence
  LRRK2 RNA guide
auaacaaaaucugugauccac

SEQ ID NO: 98963 - RNA, 21 nt, Artificial Sequence
  LRRK2 RNA guide
auaauuaagaauugcagcaag

SEQ ID NO: 98964 - RNA, 21 nt, Artificial Sequence
  LRRK2 RNA guide
auaauugaagggucaccuaga

SEQ ID NO: 98965 - RNA, 21 nt, Artificial Sequence
  LRRK2 RNA guide
auacauuacccuucccaaagu

SEQ ID NO: 98966 - RNA, 21 nt, Artificial Sequence
  LRRK2 RNA guide
auaccuuggaacugaauucac

SEQ ID NO: 98967 - RNA, 21 nt, Artificial Sequence
  LRRK2 RNA guide
auacugagccuauuuuauaga

SEQ ID NO: 98968 - RNA, 21 nt, Artificial Sequence
  LRRK2 RNA guide
auagaaagguuaagcuguuuu

SEQ ID NO: 98969 - RNA, 21 nt, Artificial Sequence
  LRRK2 RNA guide
auagaauugugaauucaguuc

SEQ ID NO: 98970 - RNA, 21 nt, Artificial Sequence
  LRRK2 RNA guide
auaggcucaguauuuauacau

SEQ ID NO: 98971 - RNA, 21 nt, Artificial Sequence
  LRRK2 RNA guide
auaguaucaguauauccaucc

SEQ ID NO: 98972 - RNA, 21 nt, Artificial Sequence
  LRRK2 RNA guide
auaguuuaagacacaaauacc

SEQ ID NO: 98973 - RNA, 21 nt, Artificial Sequence
  LRRK2 RNA guide
auauaauugaagggucaccua

SEQ ID NO: 98974 - RNA, 21 nt, Artificial Sequence
  LRRK2 RNA guide
auauccaaagaacuuuucaca

SEQ ID NO: 98975 - RNA, 21 nt, Artificial Sequence
  LRRK2 RNA guide
auauccauccaucuaaguguc

SEQ ID NO: 98976 - RNA, 21 nt, Artificial Sequence
  LRRK2 RNA guide
auaugaguauuuagauggaca

SEQ ID NO: 98977 - RNA, 21 nt, Artificial Sequence
  LRRK2 RNA guide
auauuuguaccuuaccauauc

SEQ ID NO: 98978 - RNA, 21 nt, Artificial Sequence
  LRRK2 RNA guide
aucaaaagucuucuauguagg

SEQ ID NO: 98979 - RNA, 21 nt, Artificial Sequence
  LRRK2 RNA guide
aucaguauauccauccaucua

SEQ ID NO: 98980 - RNA, 21 nt, Artificial Sequence
  LRRK2 RNA guide
auccaaagaacuuuucacaca

SEQ ID NO: 98981 - RNA, 21 nt, Artificial Sequence
  LRRK2 RNA guide
auccacuccuugcugcaauuc

SEQ ID NO: 98982 - RNA, 21 nt, Artificial Sequence
  LRRK2 RNA guide
auccauccaucuaagugucca

SEQ ID NO: 98983 - RNA, 21 nt, Artificial Sequence
  LRRK2 RNA guide
auccaucuaaguguccaucua

SEQ ID NO: 98984 - RNA, 21 nt, Artificial Sequence
  LRRK2 RNA guide
aucuaaguguccaucuaaaua

SEQ ID NO: 98985 - RNA, 21 nt, Artificial Sequence
  LRRK2 RNA guide
aucugugauccacuccuugcu

SEQ ID NO: 98986 - RNA, 21 nt, Artificial Sequence
  LRRK2 RNA guide
augaguauuuagauggacacu

SEQ ID NO: 98987 - RNA, 21 nt, Artificial Sequence
  LRRK2 RNA guide
auggacacuuagauggaugga

SEQ ID NO: 98988 - RNA, 21 nt, Artificial Sequence
  LRRK2 RNA guide
auggauggauauacugauacu

SEQ ID NO: 98989 - RNA, 21 nt, Artificial Sequence
  LRRK2 RNA guide
augugagucugagaaaacagc

SEQ ID NO: 98990 - RNA, 21 nt, Artificial Sequence
  LRRK2 RNA guide
augugugugaaaaguucuuug

SEQ ID NO: 98991 - RNA, 21 nt, Artificial Sequence
  LRRK2 RNA guide
auguuaaacgagguaaugugu

SEQ ID NO: 98992 - RNA, 21 nt, Artificial Sequence
  LRRK2 RNA guide
auuaagaauugcagcaaggag

SEQ ID NO: 98993 - RNA, 21 nt, Artificial Sequence
  LRRK2 RNA guide
auuacccuucccaaaguuaca

SEQ ID NO: 98994 - RNA, 21 nt, Artificial Sequence
  LRRK2 RNA guide
auuaugugagucugagaaaac

SEQ ID NO: 98995 - RNA, 21 nt, Artificial Sequence
  LRRK2 RNA guide
auucaauauaauugaaggguc

SEQ ID NO: 98996 - RNA, 21 nt, Artificial Sequence
  LRRK2 RNA guide
auucacaauucuauuuucuag

SEQ ID NO: 98997 - RNA, 21 nt, Artificial Sequence
  LRRK2 RNA guide
auucaguuccaagguauuugu

SEQ ID NO: 98998 - RNA, 21 nt, Artificial Sequence
  LRRK2 RNA guide
auucuauuuucuaggugaccc

SEQ ID NO: 98999 - RNA, 21 nt, Artificial Sequence
  LRRK2 RNA guide
auugaagggucaccuagaaaa

SEQ ID NO: 99000 - RNA, 21 nt, Artificial Sequence
  LRRK2 RNA guide
auugcagcaaggaguggauca

SEQ ID NO: 99001 - RNA, 21 nt, Artificial Sequence
  LRRK2 RNA guide
auuguaacuuugggaagggua

SEQ ID NO: 99002 - RNA, 21 nt, Artificial Sequence
  LRRK2 RNA guide
auugugaauucaguuccaagg

SEQ ID NO: 99003 - RNA, 21 nt, Artificial Sequence
  LRRK2 RNA guide
auuuagauggacacuuagaug

SEQ ID NO: 99004 - RNA, 21 nt, Artificial Sequence
  LRRK2 RNA guide
auuuauacauuacccuuccca

SEQ ID NO: 99005 - RNA, 21 nt, Artificial Sequence
  LRRK2 RNA guide
auuugcaucaaaagucuucua

SEQ ID NO: 99006 - RNA, 21 nt, Artificial Sequence
  LRRK2 RNA guide
auuuguaccuuaccauaucca

SEQ ID NO: 99007 - RNA, 21 nt, Artificial Sequence
  LRRK2 RNA guide
auuuucuaggugacccuucaa

SEQ ID NO: 99008 - RNA, 21 nt, Artificial Sequence
  LRRK2 RNA guide
caaaagucuucuauguaggcc

SEQ ID NO: 99009 - RNA, 21 nt, Artificial Sequence
  LRRK2 RNA guide
caaaaucugugauccacuccu

SEQ ID NO: 99010 - RNA, 21 nt, Artificial Sequence
  LRRK2 RNA guide
caaagaacuuuucacacacau

SEQ ID NO: 99011 - RNA, 21 nt, Artificial Sequence
  LRRK2 RNA guide
caaaguuacaauguuaaacga

SEQ ID NO: 99012 - RNA, 21 nt, Artificial Sequence
  LRRK2 RNA guide
caaauaccuuggaacugaauu

SEQ ID NO: 99013 - RNA, 21 nt, Artificial Sequence
  LRRK2 RNA guide
caaauaugaguauuuagaugg

SEQ ID NO: 99014 - RNA, 21 nt, Artificial Sequence
  LRRK2 RNA guide
caaauuugcaucaaaagucuu

SEQ ID NO: 99015 - RNA, 21 nt, Artificial Sequence
  LRRK2 RNA guide
caacaaauuugcaucaaaagu

SEQ ID NO: 99016 - RNA, 21 nt, Artificial Sequence
  LRRK2 RNA guide
caaggaguggaucacagauuu

SEQ ID NO: 99017 - RNA, 21 nt, Artificial Sequence
  LRRK2 RNA guide
caagguauuugugucuuaaac

SEQ ID NO: 99018 - RNA, 21 nt, Artificial Sequence
  LRRK2 RNA guide
caauauaauugaagggucacc

SEQ ID NO: 99019 - RNA, 21 nt, Artificial Sequence
  LRRK2 RNA guide
caauguuaaacgagguaaugu

SEQ ID NO: 99020 - RNA, 21 nt, Artificial Sequence
  LRRK2 RNA guide
caauucuauuuucuaggugac

SEQ ID NO: 99021 - RNA, 21 nt, Artificial Sequence
  LRRK2 RNA guide
caauucuuaauuaugugaguc

SEQ ID NO: 99022 - RNA, 21 nt, Artificial Sequence
  LRRK2 RNA guide
cacaaauaccuuggaacugaa

SEQ ID NO: 99023 - RNA, 21 nt, Artificial Sequence
  LRRK2 RNA guide
cacaauucuauuuucuaggug

SEQ ID NO: 99024 - RNA, 21 nt, Artificial Sequence
  LRRK2 RNA guide
cacacacauuaccucguuuaa

SEQ ID NO: 99025 - RNA, 21 nt, Artificial Sequence
  LRRK2 RNA guide
cacacauuaccucguuuaaca

SEQ ID NO: 99026 - RNA, 21 nt, Artificial Sequence
  LRRK2 RNA guide
cacauaauuaagaauugcagc

SEQ ID NO: 99027 - RNA, 21 nt, Artificial Sequence
  LRRK2 RNA guide
cacauuaccucguuuaacauu

SEQ ID NO: 99028 - RNA, 21 nt, Artificial Sequence
  LRRK2 RNA guide
caccuagaaaauagaauugug

SEQ ID NO: 99029 - RNA, 21 nt, Artificial Sequence
  LRRK2 RNA guide
cacuccuugcugcaauucuua

SEQ ID NO: 99030 - RNA, 21 nt, Artificial Sequence
  LRRK2 RNA guide
cacuuagauggauggauauac

SEQ ID NO: 99031 - RNA, 21 nt, Artificial Sequence
  LRRK2 RNA guide
cagacucacauaauuaagaau

SEQ ID NO: 99032 - RNA, 21 nt, Artificial Sequence
  LRRK2 RNA guide
cagcaaggaguggaucacaga

SEQ ID NO: 99033 - RNA, 21 nt, Artificial Sequence
  LRRK2 RNA guide
cagcuuaaccuuucuauaaaa

SEQ ID NO: 99034 - RNA, 21 nt, Artificial Sequence
  LRRK2 RNA guide
caguauauccauccaucuaag

SEQ ID NO: 99035 - RNA, 21 nt, Artificial Sequence
  LRRK2 RNA guide
caguauuuauacauuacccuu

SEQ ID NO: 99036 - RNA, 21 nt, Artificial Sequence
  LRRK2 RNA guide
caguuccaagguauuuguguc

SEQ ID NO: 99037 - RNA, 21 nt, Artificial Sequence
  LRRK2 RNA guide
cauaauuaagaauugcagcaa

SEQ ID NO: 99038 - RNA, 21 nt, Artificial Sequence
  LRRK2 RNA guide
cauagaagacuuuugaugcaa

SEQ ID NO: 99039 - RNA, 21 nt, Artificial Sequence
  LRRK2 RNA guide
cauaguaucaguauauccauc

SEQ ID NO: 99040 - RNA, 21 nt, Artificial Sequence
  LRRK2 RNA guide
cauaguuuaagacacaaauac

SEQ ID NO: 99041 - RNA, 21 nt, Artificial Sequence
  LRRK2 RNA guide
cauauccaaagaacuuuucac

SEQ ID NO: 99042 - RNA, 21 nt, Artificial Sequence
  LRRK2 RNA guide
cauauuuguaccuuaccauau

SEQ ID NO: 99043 - RNA, 21 nt, Artificial Sequence
  LRRK2 RNA guide
caucaaaagucuucuauguag

SEQ ID NO: 99044 - RNA, 21 nt, Artificial Sequence
  LRRK2 RNA guide
cauccaucuaaguguccaucu

SEQ ID NO: 99045 - RNA, 21 nt, Artificial Sequence
  LRRK2 RNA guide
caucuaaguguccaucuaaau

SEQ ID NO: 99046 - RNA, 21 nt, Artificial Sequence
  LRRK2 RNA guide
cauuacccuucccaaaguuac

SEQ ID NO: 99047 - RNA, 21 nt, Artificial Sequence
  LRRK2 RNA guide
cauuaccucguuuaacauugu

SEQ ID NO: 99048 - RNA, 21 nt, Artificial Sequence
  LRRK2 RNA guide
cauuguaacuuugggaagggu

SEQ ID NO: 99049 - RNA, 21 nt, Artificial Sequence
  LRRK2 RNA guide
ccaaagaacuuuucacacaca

SEQ ID NO: 99050 - RNA, 21 nt, Artificial Sequence
  LRRK2 RNA guide
ccaaaguuacaauguuaaacg

SEQ ID NO: 99051 - RNA, 21 nt, Artificial Sequence
  LRRK2 RNA guide
ccaagguauuugugucuuaaa

SEQ ID NO: 99052 - RNA, 21 nt, Artificial Sequence
  LRRK2 RNA guide
ccacuccuugcugcaauucuu

SEQ ID NO: 99053 - RNA, 21 nt, Artificial Sequence
  LRRK2 RNA guide
ccauauccaaagaacuuuuca

SEQ ID NO: 99054 - RNA, 21 nt, Artificial Sequence
  LRRK2 RNA guide
ccauccaucuaaguguccauc

SEQ ID NO: 99055 - RNA, 21 nt, Artificial Sequence
  LRRK2 RNA guide
ccaucuaaguguccaucuaaa

SEQ ID NO: 99056 - RNA, 21 nt, Artificial Sequence
  LRRK2 RNA guide
cccaaaguuacaauguuaaac

SEQ ID NO: 99057 - RNA, 21 nt, Artificial Sequence
  LRRK2 RNA guide
cccuucaauuauauugaauaa

SEQ ID NO: 99058 - RNA, 21 nt, Artificial Sequence
  LRRK2 RNA guide
cccuucccaaaguuacaaugu

SEQ ID NO: 99059 - RNA, 21 nt, Artificial Sequence
  LRRK2 RNA guide
ccuacauagaagacuuuugau

SEQ ID NO: 99060 - RNA, 21 nt, Artificial Sequence
  LRRK2 RNA guide
ccuagaaaauagaauugugaa

SEQ ID NO: 99061 - RNA, 21 nt, Artificial Sequence
  LRRK2 RNA guide
ccuagggccuacauagaagac

SEQ ID NO: 99062 - RNA, 21 nt, Artificial Sequence
  LRRK2 RNA guide
ccuauuuuauagaaagguuaa

SEQ ID NO: 99063 - RNA, 21 nt, Artificial Sequence
  LRRK2 RNA guide
ccucguuuaacauuguaacuu

SEQ ID NO: 99064 - RNA, 21 nt, Artificial Sequence
  LRRK2 RNA guide
ccuuaccauauccaaagaacu

SEQ ID NO: 99065 - RNA, 21 nt, Artificial Sequence
  LRRK2 RNA guide
ccuucccaaaguuacaauguu

SEQ ID NO: 99066 - RNA, 21 nt, Artificial Sequence
  LRRK2 RNA guide
ccuugcugcaauucuuaauua

SEQ ID NO: 99067 - RNA, 21 nt, Artificial Sequence
  LRRK2 RNA guide
ccuuggaacugaauucacaau

SEQ ID NO: 99068 - RNA, 21 nt, Artificial Sequence
  LRRK2 RNA guide
ccuuucuauaaaauaggcuca

SEQ ID NO: 99069 - RNA, 21 nt, Artificial Sequence
  LRRK2 RNA guide
cgagguaaugugugugaaaag

SEQ ID NO: 99070 - RNA, 21 nt, Artificial Sequence
  LRRK2 RNA guide
cguuuaacauuguaacuuugg

SEQ ID NO: 99071 - RNA, 21 nt, Artificial Sequence
  LRRK2 RNA guide
cuaaauacucauauuuguacc

SEQ ID NO: 99072 - RNA, 21 nt, Artificial Sequence
  LRRK2 RNA guide
cuaaguguccaucuaaauacu

SEQ ID NO: 99073 - RNA, 21 nt, Artificial Sequence
  LRRK2 RNA guide
cuacauagaagacuuuugaug

SEQ ID NO: 99074 - RNA, 21 nt, Artificial Sequence
  LRRK2 RNA guide
cuagggccuacauagaagacu

SEQ ID NO: 99075 - RNA, 21 nt, Artificial Sequence
  LRRK2 RNA guide
cuaggugacccuucaauuaua

SEQ ID NO: 99076 - RNA, 21 nt, Artificial Sequence
  LRRK2 RNA guide
cuauuuucuaggugacccuuc

SEQ ID NO: 99077 - RNA, 21 nt, Artificial Sequence
  LRRK2 RNA guide
cucacauaauuaagaauugca

SEQ ID NO: 99078 - RNA, 21 nt, Artificial Sequence
  LRRK2 RNA guide
cucagacucacauaauuaaga

SEQ ID NO: 99079 - RNA, 21 nt, Artificial Sequence
  LRRK2 RNA guide
cucaguauuuauacauuaccc

SEQ ID NO: 99080 - RNA, 21 nt, Artificial Sequence
  LRRK2 RNA guide
cucauauuuguaccuuaccau

SEQ ID NO: 99081 - RNA, 21 nt, Artificial Sequence
  LRRK2 RNA guide
cuccuugcugcaauucuuaau

SEQ ID NO: 99082 - RNA, 21 nt, Artificial Sequence
  LRRK2 RNA guide
cucguuuaacauuguaacuuu

SEQ ID NO: 99083 - RNA, 21 nt, Artificial Sequence
  LRRK2 RNA guide
cugaauucacaauucuauuuu

SEQ ID NO: 99084 - RNA, 21 nt, Artificial Sequence
  LRRK2 RNA guide
cugagaaaacagcuuaaccuu

SEQ ID NO: 99085 - RNA, 21 nt, Artificial Sequence
  LRRK2 RNA guide
cugagccuauuuuauagaaag

SEQ ID NO: 99086 - RNA, 21 nt, Artificial Sequence
  LRRK2 RNA guide
cugcaauucuuaauuauguga

SEQ ID NO: 99087 - RNA, 21 nt, Artificial Sequence
  LRRK2 RNA guide
cugugauccacuccuugcugc

SEQ ID NO: 99088 - RNA, 21 nt, Artificial Sequence
  LRRK2 RNA guide
cuguuuucucagacucacaua

SEQ ID NO: 99089 - RNA, 21 nt, Artificial Sequence
  LRRK2 RNA guide
cuuaaccuuucuauaaaauag

SEQ ID NO: 99090 - RNA, 21 nt, Artificial Sequence
  LRRK2 RNA guide
cuuaauuaugugagucugaga

SEQ ID NO: 99091 - RNA, 21 nt, Artificial Sequence
  LRRK2 RNA guide
cuuaccauauccaaagaacuu

SEQ ID NO: 99092 - RNA, 21 nt, Artificial Sequence
  LRRK2 RNA guide
cuuagauggauggauauacug

SEQ ID NO: 99093 - RNA, 21 nt, Artificial Sequence
  LRRK2 RNA guide
cuucccaaaguuacaauguua

SEQ ID NO: 99094 - RNA, 21 nt, Artificial Sequence
  LRRK2 RNA guide
cuugcugcaauucuuaauuau

SEQ ID NO: 99095 - RNA, 21 nt, Artificial Sequence
  LRRK2 RNA guide
cuuggaacugaauucacaauu

SEQ ID NO: 99096 - RNA, 21 nt, Artificial Sequence
  LRRK2 RNA guide
cuuuggauaugguaagguaca

SEQ ID NO: 99097 - RNA, 21 nt, Artificial Sequence
  LRRK2 RNA guide
cuuugggaaggguaauguaua

SEQ ID NO: 99098 - RNA, 21 nt, Artificial Sequence
  LRRK2 RNA guide
cuuuucacacacauuaccucg

SEQ ID NO: 99099 - RNA, 21 nt, Artificial Sequence
  LRRK2 RNA guide
gaaaaguucuuuggauauggu

SEQ ID NO: 99100 - RNA, 21 nt, Artificial Sequence
  LRRK2 RNA guide
gaaaauagaauugugaauuca

SEQ ID NO: 99101 - RNA, 21 nt, Artificial Sequence
  LRRK2 RNA guide
gaaagguuaagcuguuuucuc

SEQ ID NO: 99102 - RNA, 21 nt, Artificial Sequence
  LRRK2 RNA guide
gaacuuuucacacacauuacc

SEQ ID NO: 99103 - RNA, 21 nt, Artificial Sequence
  LRRK2 RNA guide
gaagacuuuugaugcaaauuu

SEQ ID NO: 99104 - RNA, 21 nt, Artificial Sequence
  LRRK2 RNA guide
gaaggguaauguauaaauacu

SEQ ID NO: 99105 - RNA, 21 nt, Artificial Sequence
  LRRK2 RNA guide
gaagggucaccuagaaaauag

SEQ ID NO: 99106 - RNA, 21 nt, Artificial Sequence
  LRRK2 RNA guide
gaauucacaauucuauuuucu

SEQ ID NO: 99107 - RNA, 21 nt, Artificial Sequence
  LRRK2 RNA guide
gaauucaguuccaagguauuu

SEQ ID NO: 99108 - RNA, 21 nt, Artificial Sequence
  LRRK2 RNA guide
gaauugcagcaaggaguggau

SEQ ID NO: 99109 - RNA, 21 nt, Artificial Sequence
  LRRK2 RNA guide
gaauugugaauucaguuccaa

SEQ ID NO: 99110 - RNA, 21 nt, Artificial Sequence
  LRRK2 RNA guide
gacacaaauaccuuggaacug

SEQ ID NO: 99111 - RNA, 21 nt, Artificial Sequence
  LRRK2 RNA guide
gacacuuagauggauggauau

SEQ ID NO: 99112 - RNA, 21 nt, Artificial Sequence
  LRRK2 RNA guide
gacauaguaucaguauaucca

SEQ ID NO: 99113 - RNA, 21 nt, Artificial Sequence
  LRRK2 RNA guide
gacucacauaauuaagaauug

SEQ ID NO: 99114 - RNA, 21 nt, Artificial Sequence
  LRRK2 RNA guide
gagaaaacagcuuaaccuuuc

SEQ ID NO: 99115 - RNA, 21 nt, Artificial Sequence
  LRRK2 RNA guide
gagccuauuuuauagaaaggu

SEQ ID NO: 99116 - RNA, 21 nt, Artificial Sequence
  LRRK2 RNA guide
gagguaaugugugugaaaagu

SEQ ID NO: 99117 - RNA, 21 nt, Artificial Sequence
  LRRK2 RNA guide
gaguauuuagauggacacuua

SEQ ID NO: 99118 - RNA, 21 nt, Artificial Sequence
  LRRK2 RNA guide
gagucugagaaaacagcuuaa

SEQ ID NO: 99119 - RNA, 21 nt, Artificial Sequence
  LRRK2 RNA guide
gaguggaucacagauuuuguu

SEQ ID NO: 99120 - RNA, 21 nt, Artificial Sequence
  LRRK2 RNA guide
gauaugguaagguacaaauau

SEQ ID NO: 99121 - RNA, 21 nt, Artificial Sequence
  LRRK2 RNA guide
gauccacuccuugcugcaauu

SEQ ID NO: 99122 - RNA, 21 nt, Artificial Sequence
  LRRK2 RNA guide
gauggacacuuagauggaugg

SEQ ID NO: 99123 - RNA, 21 nt, Artificial Sequence
  LRRK2 RNA guide
gauggauauacugauacuaug

SEQ ID NO: 99124 - RNA, 21 nt, Artificial Sequence
  LRRK2 RNA guide
gauggauggauauacugauac

SEQ ID NO: 99125 - RNA, 21 nt, Artificial Sequence
  LRRK2 RNA guide
gcaaggaguggaucacagauu

SEQ ID NO: 99126 - RNA, 21 nt, Artificial Sequence
  LRRK2 RNA guide
gcaauucuuaauuaugugagu

SEQ ID NO: 99127 - RNA, 21 nt, Artificial Sequence
  LRRK2 RNA guide
gcagcaaggaguggaucacag

SEQ ID NO: 99128 - RNA, 21 nt, Artificial Sequence
  LRRK2 RNA guide
gcaucaaaagucuucuaugua

SEQ ID NO: 99129 - RNA, 21 nt, Artificial Sequence
  LRRK2 RNA guide
gccuacauagaagacuuuuga

SEQ ID NO: 99130 - RNA, 21 nt, Artificial Sequence
  LRRK2 RNA guide
gccuagggccuacauagaaga

SEQ ID NO: 99131 - RNA, 21 nt, Artificial Sequence
  LRRK2 RNA guide
gccuauuuuauagaaagguua

SEQ ID NO: 99132 - RNA, 21 nt, Artificial Sequence
  LRRK2 RNA guide
gcucaguauuuauacauuacc

SEQ ID NO: 99133 - RNA, 21 nt, Artificial Sequence
  LRRK2 RNA guide
gcugcaauucuuaauuaugug

SEQ ID NO: 99134 - RNA, 21 nt, Artificial Sequence
  LRRK2 RNA guide
gcuguuuucucagacucacau

SEQ ID NO: 99135 - RNA, 21 nt, Artificial Sequence
  LRRK2 RNA guide
gcuuaaccuuucuauaaaaua

SEQ ID NO: 99136 - RNA, 21 nt, Artificial Sequence
  LRRK2 RNA guide
ggaacugaauucacaauucua

SEQ ID NO: 99137 - RNA, 21 nt, Artificial Sequence
  LRRK2 RNA guide
ggaaggguaauguauaaauac

SEQ ID NO: 99138 - RNA, 21 nt, Artificial Sequence
  LRRK2 RNA guide
ggacacuuagauggauggaua

SEQ ID NO: 99139 - RNA, 21 nt, Artificial Sequence
  LRRK2 RNA guide
ggaguggaucacagauuuugu

SEQ ID NO: 99140 - RNA, 21 nt, Artificial Sequence
  LRRK2 RNA guide
ggauaugguaagguacaaaua

SEQ ID NO: 99141 - RNA, 21 nt, Artificial Sequence
  LRRK2 RNA guide
ggauggauauacugauacuau

SEQ ID NO: 99142 - RNA, 21 nt, Artificial Sequence
  LRRK2 RNA guide
ggccuacauagaagacuuuug

SEQ ID NO: 99143 - RNA, 21 nt, Artificial Sequence
  LRRK2 RNA guide
ggcucaguauuuauacauuac

SEQ ID NO: 99144 - RNA, 21 nt, Artificial Sequence
  LRRK2 RNA guide
gggaaggguaauguauaaaua

SEQ ID NO: 99145 - RNA, 21 nt, Artificial Sequence
  LRRK2 RNA guide
gggccuacauagaagacuuuu

SEQ ID NO: 99146 - RNA, 21 nt, Artificial Sequence
  LRRK2 RNA guide
ggguaauguauaaauacugag

SEQ ID NO: 99147 - RNA, 21 nt, Artificial Sequence
  LRRK2 RNA guide
gggucaccuagaaaauagaau

SEQ ID NO: 99148 - RNA, 21 nt, Artificial Sequence
  LRRK2 RNA guide
gguaagguacaaauaugagua

SEQ ID NO: 99149 - RNA, 21 nt, Artificial Sequence
  LRRK2 RNA guide
gguaauguauaaauacugagc

SEQ ID NO: 99150 - RNA, 21 nt, Artificial Sequence
  LRRK2 RNA guide
gguaaugugugugaaaaguuc

SEQ ID NO: 99151 - RNA, 21 nt, Artificial Sequence
  LRRK2 RNA guide
gguauuugugucuuaaacuau

SEQ ID NO: 99152 - RNA, 21 nt, Artificial Sequence
  LRRK2 RNA guide
ggucaccuagaaaauagaauu

SEQ ID NO: 99153 - RNA, 21 nt, Artificial Sequence
  LRRK2 RNA guide
ggucuuuauucaauauaauug

SEQ ID NO: 99154 - RNA, 21 nt, Artificial Sequence
  LRRK2 RNA guide
ggugacccuucaauuauauug

SEQ ID NO: 99155 - RNA, 21 nt, Artificial Sequence
  LRRK2 RNA guide
gguuaagcuguuuucucagac

SEQ ID NO: 99156 - RNA, 21 nt, Artificial Sequence
  LRRK2 RNA guide
guaaaguuguucauaguuuaa

SEQ ID NO: 99157 - RNA, 21 nt, Artificial Sequence
  LRRK2 RNA guide
guaacuuugggaaggguaaug

SEQ ID NO: 99158 - RNA, 21 nt, Artificial Sequence
  LRRK2 RNA guide
guaaugugugugaaaaguucu

SEQ ID NO: 99159 - RNA, 21 nt, Artificial Sequence
  LRRK2 RNA guide
guacaaauaugaguauuuaga

SEQ ID NO: 99160 - RNA, 21 nt, Artificial Sequence
  LRRK2 RNA guide
guaccuuaccauauccaaaga

SEQ ID NO: 99161 - RNA, 21 nt, Artificial Sequence
  LRRK2 RNA guide
guauauccauccaucuaagug

SEQ ID NO: 99162 - RNA, 21 nt, Artificial Sequence
  LRRK2 RNA guide
guaucaguauauccauccauc

SEQ ID NO: 99163 - RNA, 21 nt, Artificial Sequence
  LRRK2 RNA guide
guauuuagauggacacuuaga

SEQ ID NO: 99164 - RNA, 21 nt, Artificial Sequence
  LRRK2 RNA guide
guauuuauacauuacccuucc

SEQ ID NO: 99165 - RNA, 21 nt, Artificial Sequence
  LRRK2 RNA guide
gucaccuagaaaauagaauug

SEQ ID NO: 99166 - RNA, 21 nt, Artificial Sequence
  LRRK2 RNA guide
guccaucuaaauacucauauu

SEQ ID NO: 99167 - RNA, 21 nt, Artificial Sequence
  LRRK2 RNA guide
gucugagaaaacagcuuaacc

SEQ ID NO: 99168 - RNA, 21 nt, Artificial Sequence
  LRRK2 RNA guide
gugaaaaguucuuuggauaug

SEQ ID NO: 99169 - RNA, 21 nt, Artificial Sequence
  LRRK2 RNA guide
gugaauucaguuccaagguau

SEQ ID NO: 99170 - RNA, 21 nt, Artificial Sequence
  LRRK2 RNA guide
gugagucugagaaaacagcuu

SEQ ID NO: 99171 - RNA, 21 nt, Artificial Sequence
  LRRK2 RNA guide
gugauccacuccuugcugcaa

SEQ ID NO: 99172 - RNA, 21 nt, Artificial Sequence
  LRRK2 RNA guide
guguccaucuaaauacucaua

SEQ ID NO: 99173 - RNA, 21 nt, Artificial Sequence
  LRRK2 RNA guide
gugucuuaaacuaugaacaac

SEQ ID NO: 99174 - RNA, 21 nt, Artificial Sequence
  LRRK2 RNA guide
gugugaaaaguucuuuggaua

SEQ ID NO: 99175 - RNA, 21 nt, Artificial Sequence
  LRRK2 RNA guide
gugugugaaaaguucuuugga

SEQ ID NO: 99176 - RNA, 21 nt, Artificial Sequence
  LRRK2 RNA guide
guuaaacgagguaaugugugu

SEQ ID NO: 99177 - RNA, 21 nt, Artificial Sequence
  LRRK2 RNA guide
guuaagcuguuuucucagacu

SEQ ID NO: 99178 - RNA, 21 nt, Artificial Sequence
  LRRK2 RNA guide
guuacaauguuaaacgaggua

SEQ ID NO: 99179 - RNA, 21 nt, Artificial Sequence
  LRRK2 RNA guide
guucauaguuuaagacacaaa

SEQ ID NO: 99180 - RNA, 21 nt, Artificial Sequence
  LRRK2 RNA guide
guuccaagguauuugugucuu

SEQ ID NO: 99181 - RNA, 21 nt, Artificial Sequence
  LRRK2 RNA guide
guucuuuggauaugguaaggu

SEQ ID NO: 99182 - RNA, 21 nt, Artificial Sequence
  LRRK2 RNA guide
guuuaacauuguaacuuuggg

SEQ ID NO: 99183 - RNA, 21 nt, Artificial Sequence
  LRRK2 RNA guide
guuuaagacacaaauaccuug

SEQ ID NO: 99184 - RNA, 21 nt, Artificial Sequence
  LRRK2 RNA guide
guuuucucagacucacauaau

SEQ ID NO: 99185 - RNA, 21 nt, Artificial Sequence
  LRRK2 RNA guide
uaaacgagguaauguguguga

SEQ ID NO: 99186 - RNA, 21 nt, Artificial Sequence
  LRRK2 RNA guide
uaacaaaaucugugauccacu

SEQ ID NO: 99187 - RNA, 21 nt, Artificial Sequence
  LRRK2 RNA guide
uaacauuguaacuuugggaag

SEQ ID NO: 99188 - RNA, 21 nt, Artificial Sequence
  LRRK2 RNA guide
uaaccuuucuauaaaauaggc

SEQ ID NO: 99189 - RNA, 21 nt, Artificial Sequence
  LRRK2 RNA guide
uaacuuugggaaggguaaugu

SEQ ID NO: 99190 - RNA, 21 nt, Artificial Sequence
  LRRK2 RNA guide
uaagaauugcagcaaggagug

SEQ ID NO: 99191 - RNA, 21 nt, Artificial Sequence
  LRRK2 RNA guide
uaagacacaaauaccuuggaa

SEQ ID NO: 99192 - RNA, 21 nt, Artificial Sequence
  LRRK2 RNA guide
uaagcuguuuucucagacuca

SEQ ID NO: 99193 - RNA, 21 nt, Artificial Sequence
  LRRK2 RNA guide
uaaugugugugaaaaguucuu

SEQ ID NO: 99194 - RNA, 21 nt, Artificial Sequence
  LRRK2 RNA guide
uaauuaagaauugcagcaagg

SEQ ID NO: 99195 - RNA, 21 nt, Artificial Sequence
  LRRK2 RNA guide
uaauuaugugagucugagaaa

SEQ ID NO: 99196 - RNA, 21 nt, Artificial Sequence
  LRRK2 RNA guide
uaauugaagggucaccuagaa

SEQ ID NO: 99197 - RNA, 21 nt, Artificial Sequence
  LRRK2 RNA guide
uacaauguuaaacgagguaau

SEQ ID NO: 99198 - RNA, 21 nt, Artificial Sequence
  LRRK2 RNA guide
uacauuacccuucccaaaguu

SEQ ID NO: 99199 - RNA, 21 nt, Artificial Sequence
  LRRK2 RNA guide
uaccauauccaaagaacuuuu

SEQ ID NO: 99200 - RNA, 21 nt, Artificial Sequence
  LRRK2 RNA guide
uacccuucccaaaguuacaau

SEQ ID NO: 99201 - RNA, 21 nt, Artificial Sequence
  LRRK2 RNA guide
uaccucguuuaacauuguaac

SEQ ID NO: 99202 - RNA, 21 nt, Artificial Sequence
  LRRK2 RNA guide
uaccuuaccauauccaaagaa

SEQ ID NO: 99203 - RNA, 21 nt, Artificial Sequence
  LRRK2 RNA guide
uaccuuggaacugaauucaca

SEQ ID NO: 99204 - RNA, 21 nt, Artificial Sequence
  LRRK2 RNA guide
uacucauauuuguaccuuacc

SEQ ID NO: 99205 - RNA, 21 nt, Artificial Sequence
  LRRK2 RNA guide
uacugagccuauuuuauagaa

SEQ ID NO: 99206 - RNA, 21 nt, Artificial Sequence
  LRRK2 RNA guide
uagaaagguuaagcuguuuuc

SEQ ID NO: 99207 - RNA, 21 nt, Artificial Sequence
  LRRK2 RNA guide
uagaauugugaauucaguucc

SEQ ID NO: 99208 - RNA, 21 nt, Artificial Sequence
  LRRK2 RNA guide
uagauggacacuuagauggau

SEQ ID NO: 99209 - RNA, 21 nt, Artificial Sequence
  LRRK2 RNA guide
uagauggauggauauacugau

SEQ ID NO: 99210 - RNA, 21 nt, Artificial Sequence
  LRRK2 RNA guide
uaggcucaguauuuauacauu

SEQ ID NO: 99211 - RNA, 21 nt, Artificial Sequence
  LRRK2 RNA guide
uagggccuacauagaagacuu

SEQ ID NO: 99212 - RNA, 21 nt, Artificial Sequence
  LRRK2 RNA guide
uaggugacccuucaauuauau

SEQ ID NO: 99213 - RNA, 21 nt, Artificial Sequence
  LRRK2 RNA guide
uaguaucaguauauccaucca

SEQ ID NO: 99214 - RNA, 21 nt, Artificial Sequence
  LRRK2 RNA guide
uaguuuaagacacaaauaccu

SEQ ID NO: 99215 - RNA, 21 nt, Artificial Sequence
  LRRK2 RNA guide
uauaauugaagggucaccuag

SEQ ID NO: 99216 - RNA, 21 nt, Artificial Sequence
  LRRK2 RNA guide
uauacauuacccuucccaaag

SEQ ID NO: 99217 - RNA, 21 nt, Artificial Sequence
  LRRK2 RNA guide
uauagaaagguuaagcuguuu

SEQ ID NO: 99218 - RNA, 21 nt, Artificial Sequence
  LRRK2 RNA guide
uauauccauccaucuaagugu

SEQ ID NO: 99219 - RNA, 21 nt, Artificial Sequence
  LRRK2 RNA guide
uaucaguauauccauccaucu

SEQ ID NO: 99220 - RNA, 21 nt, Artificial Sequence
  LRRK2 RNA guide
uauccaaagaacuuuucacac

SEQ ID NO: 99221 - RNA, 21 nt, Artificial Sequence
  LRRK2 RNA guide
uauccauccaucuaagugucc

SEQ ID NO: 99222 - RNA, 21 nt, Artificial Sequence
  LRRK2 RNA guide
uaugaguauuuagauggacac

SEQ ID NO: 99223 - RNA, 21 nt, Artificial Sequence
  LRRK2 RNA guide
uaugugagucugagaaaacag

SEQ ID NO: 99224 - RNA, 21 nt, Artificial Sequence
  LRRK2 RNA guide
uauucaauauaauugaagggu

SEQ ID NO: 99225 - RNA, 21 nt, Artificial Sequence
  LRRK2 RNA guide
uauuuagauggacacuuagau

SEQ ID NO: 99226 - RNA, 21 nt, Artificial Sequence
  LRRK2 RNA guide
uauuuauacauuacccuuccc

SEQ ID NO: 99227 - RNA, 21 nt, Artificial Sequence
  LRRK2 RNA guide
uauuuguaccuuaccauaucc

SEQ ID NO: 99228 - RNA, 21 nt, Artificial Sequence
  LRRK2 RNA guide
uauuuucuaggugacccuuca

SEQ ID NO: 99229 - RNA, 21 nt, Artificial Sequence
  LRRK2 RNA guide
ucaaaagucuucuauguaggc

SEQ ID NO: 99230 - RNA, 21 nt, Artificial Sequence
  LRRK2 RNA guide
ucaacaaauuugcaucaaaag

SEQ ID NO: 99231 - RNA, 21 nt, Artificial Sequence
  LRRK2 RNA guide
ucaauauaauugaagggucac

SEQ ID NO: 99232 - RNA, 21 nt, Artificial Sequence
  LRRK2 RNA guide
ucacaauucuauuuucuaggu

SEQ ID NO: 99233 - RNA, 21 nt, Artificial Sequence
  LRRK2 RNA guide
ucacacacauuaccucguuua

SEQ ID NO: 99234 - RNA, 21 nt, Artificial Sequence
  LRRK2 RNA guide
ucacauaauuaagaauugcag

SEQ ID NO: 99235 - RNA, 21 nt, Artificial Sequence
  LRRK2 RNA guide
ucagacucacauaauuaagaa

SEQ ID NO: 99236 - RNA, 21 nt, Artificial Sequence
  LRRK2 RNA guide
ucaguauauccauccaucuaa

SEQ ID NO: 99237 - RNA, 21 nt, Artificial Sequence
  LRRK2 RNA guide
ucaguauuuauacauuacccu

SEQ ID NO: 99238 - RNA, 21 nt, Artificial Sequence
  LRRK2 RNA guide
ucaguuccaagguauuugugu

SEQ ID NO: 99239 - RNA, 21 nt, Artificial Sequence
  LRRK2 RNA guide
ucauaguuuaagacacaaaua

SEQ ID NO: 99240 - RNA, 21 nt, Artificial Sequence
  LRRK2 RNA guide
ucauauuuguaccuuaccaua

SEQ ID NO: 99241 - RNA, 21 nt, Artificial Sequence
  LRRK2 RNA guide
uccaaagaacuuuucacacac

SEQ ID NO: 99242 - RNA, 21 nt, Artificial Sequence
  LRRK2 RNA guide
uccaagguauuugugucuuaa

SEQ ID NO: 99243 - RNA, 21 nt, Artificial Sequence
  LRRK2 RNA guide
uccacuccuugcugcaauucu

SEQ ID NO: 99244 - RNA, 21 nt, Artificial Sequence
  LRRK2 RNA guide
uccauccaucuaaguguccau

SEQ ID NO: 99245 - RNA, 21 nt, Artificial Sequence
  LRRK2 RNA guide
uccaucuaaguguccaucuaa

SEQ ID NO: 99246 - RNA, 21 nt, Artificial Sequence
  LRRK2 RNA guide
ucccaaaguuacaauguuaaa

SEQ ID NO: 99247 - RNA, 21 nt, Artificial Sequence
  LRRK2 RNA guide
uccuugcugcaauucuuaauu

SEQ ID NO: 99248 - RNA, 21 nt, Artificial Sequence
  LRRK2 RNA guide
ucguuuaacauuguaacuuug

SEQ ID NO: 99249 - RNA, 21 nt, Artificial Sequence
  LRRK2 RNA guide
ucuaaguguccaucuaaauac

SEQ ID NO: 99250 - RNA, 21 nt, Artificial Sequence
  LRRK2 RNA guide
ucuaggugacccuucaauuau

SEQ ID NO: 99251 - RNA, 21 nt, Artificial Sequence
  LRRK2 RNA guide
ucuauuuucuaggugacccuu

SEQ ID NO: 99252 - RNA, 21 nt, Artificial Sequence
  LRRK2 RNA guide
ucucagacucacauaauuaag

SEQ ID NO: 99253 - RNA, 21 nt, Artificial Sequence
  LRRK2 RNA guide
ucugagaaaacagcuuaaccu

SEQ ID NO: 99254 - RNA, 21 nt, Artificial Sequence
  LRRK2 RNA guide
ucugugauccacuccuugcug

SEQ ID NO: 99255 - RNA, 21 nt, Artificial Sequence
  LRRK2 RNA guide
ucuuaauuaugugagucugag

SEQ ID NO: 99256 - RNA, 21 nt, Artificial Sequence
  LRRK2 RNA guide
ucuuuggauaugguaagguac

SEQ ID NO: 99257 - RNA, 21 nt, Artificial Sequence
  LRRK2 RNA guide
ugaaaaguucuuuggauaugg

SEQ ID NO: 99258 - RNA, 21 nt, Artificial Sequence
  LRRK2 RNA guide
ugaagggucaccuagaaaaua

SEQ ID NO: 99259 - RNA, 21 nt, Artificial Sequence
  LRRK2 RNA guide
ugaauucaguuccaagguauu

SEQ ID NO: 99260 - RNA, 21 nt, Artificial Sequence
  LRRK2 RNA guide
ugacauaguaucaguauaucc

SEQ ID NO: 99261 - RNA, 21 nt, Artificial Sequence
  LRRK2 RNA guide
ugagaaaacagcuuaaccuuu

SEQ ID NO: 99262 - RNA, 21 nt, Artificial Sequence
  LRRK2 RNA guide
ugagccuauuuuauagaaagg

SEQ ID NO: 99263 - RNA, 21 nt, Artificial Sequence
  LRRK2 RNA guide
ugaguauuuagauggacacuu

SEQ ID NO: 99264 - RNA, 21 nt, Artificial Sequence
  LRRK2 RNA guide
ugagucugagaaaacagcuua

SEQ ID NO: 99265 - RNA, 21 nt, Artificial Sequence
  LRRK2 RNA guide
ugauccacuccuugcugcaau

SEQ ID NO: 99266 - RNA, 21 nt, Artificial Sequence
  LRRK2 RNA guide
ugcaauucuuaauuaugugag

SEQ ID NO: 99267 - RNA, 21 nt, Artificial Sequence
  LRRK2 RNA guide
ugcagcaaggaguggaucaca

SEQ ID NO: 99268 - RNA, 21 nt, Artificial Sequence
  LRRK2 RNA guide
ugcaucaaaagucuucuaugu

SEQ ID NO: 99269 - RNA, 21 nt, Artificial Sequence
  LRRK2 RNA guide
ugcugcaauucuuaauuaugu

SEQ ID NO: 99270 - RNA, 21 nt, Artificial Sequence
  LRRK2 RNA guide
uggacacuuagauggauggau

SEQ ID NO: 99271 - RNA, 21 nt, Artificial Sequence
  LRRK2 RNA guide
uggauaugguaagguacaaau

SEQ ID NO: 99272 - RNA, 21 nt, Artificial Sequence
  LRRK2 RNA guide
uggauggauauacugauacua

SEQ ID NO: 99273 - RNA, 21 nt, Artificial Sequence
  LRRK2 RNA guide
ugggaaggguaauguauaaau

SEQ ID NO: 99274 - RNA, 21 nt, Artificial Sequence
  LRRK2 RNA guide
uguaacuuugggaaggguaau

SEQ ID NO: 99275 - RNA, 21 nt, Artificial Sequence
  LRRK2 RNA guide
uguaccuuaccauauccaaag

SEQ ID NO: 99276 - RNA, 21 nt, Artificial Sequence
  LRRK2 RNA guide
ugugaaaaguucuuuggauau

SEQ ID NO: 99277 - RNA, 21 nt, Artificial Sequence
  LRRK2 RNA guide
ugugaauucaguuccaaggua

SEQ ID NO: 99278 - RNA, 21 nt, Artificial Sequence
  LRRK2 RNA guide
ugugagucugagaaaacagcu

SEQ ID NO: 99279 - RNA, 21 nt, Artificial Sequence
  LRRK2 RNA guide
ugugauccacuccuugcugca

SEQ ID NO: 99280 - RNA, 21 nt, Artificial Sequence
  LRRK2 RNA guide
ugugugaaaaguucuuuggau

SEQ ID NO: 99281 - RNA, 21 nt, Artificial Sequence
  LRRK2 RNA guide
ugugugugaaaaguucuuugg

SEQ ID NO: 99282 - RNA, 21 nt, Artificial Sequence
  LRRK2 RNA guide
uguuaaacgagguaaugugug

SEQ ID NO: 99283 - RNA, 21 nt, Artificial Sequence
  LRRK2 RNA guide
uguucauaguuuaagacacaa

SEQ ID NO: 99284 - RNA, 21 nt, Artificial Sequence
  LRRK2 RNA guide
uguuuucucagacucacauaa

SEQ ID NO: 99285 - RNA, 21 nt, Artificial Sequence
  LRRK2 RNA guide
uuaaacgagguaaugugugug

SEQ ID NO: 99286 - RNA, 21 nt, Artificial Sequence
  LRRK2 RNA guide
uuaacauuguaacuuugggaa

SEQ ID NO: 99287 - RNA, 21 nt, Artificial Sequence
  LRRK2 RNA guide
uuaaccuuucuauaaaauagg

SEQ ID NO: 99288 - RNA, 21 nt, Artificial Sequence
  LRRK2 RNA guide
uuaagaauugcagcaaggagu

SEQ ID NO: 99289 - RNA, 21 nt, Artificial Sequence
  LRRK2 RNA guide
uuaagacacaaauaccuugga

SEQ ID NO: 99290 - RNA, 21 nt, Artificial Sequence
  LRRK2 RNA guide
uuaagcuguuuucucagacuc

SEQ ID NO: 99291 - RNA, 21 nt, Artificial Sequence
  LRRK2 RNA guide
uuaauuaugugagucugagaa

SEQ ID NO: 99292 - RNA, 21 nt, Artificial Sequence
  LRRK2 RNA guide
uuacaauguuaaacgagguaa

SEQ ID NO: 99293 - RNA, 21 nt, Artificial Sequence
  LRRK2 RNA guide
uuaccauauccaaagaacuuu

SEQ ID NO: 99294 - RNA, 21 nt, Artificial Sequence
  LRRK2 RNA guide
uuacccuucccaaaguuacaa

SEQ ID NO: 99295 - RNA, 21 nt, Artificial Sequence
  LRRK2 RNA guide
uuaccucguuuaacauuguaa

SEQ ID NO: 99296 - RNA, 21 nt, Artificial Sequence
  LRRK2 RNA guide
uuagauggacacuuagaugga

SEQ ID NO: 99297 - RNA, 21 nt, Artificial Sequence
  LRRK2 RNA guide
uuagauggauggauauacuga

SEQ ID NO: 99298 - RNA, 21 nt, Artificial Sequence
  LRRK2 RNA guide
uuauacauuacccuucccaaa

SEQ ID NO: 99299 - RNA, 21 nt, Artificial Sequence
  LRRK2 RNA guide
uuauagaaagguuaagcuguu

SEQ ID NO: 99300 - RNA, 21 nt, Artificial Sequence
  LRRK2 RNA guide
uuaugugagucugagaaaaca

SEQ ID NO: 99301 - RNA, 21 nt, Artificial Sequence
  LRRK2 RNA guide
uuauucaauauaauugaaggg

SEQ ID NO: 99302 - RNA, 21 nt, Artificial Sequence
  LRRK2 RNA guide
uucaauauaauugaaggguca

SEQ ID NO: 99303 - RNA, 21 nt, Artificial Sequence
  LRRK2 RNA guide
uucacaauucuauuuucuagg

SEQ ID NO: 99304 - RNA, 21 nt, Artificial Sequence
  LRRK2 RNA guide
uucacacacauuaccucguuu

SEQ ID NO: 99305 - RNA, 21 nt, Artificial Sequence
  LRRK2 RNA guide
uucaguuccaagguauuugug

SEQ ID NO: 99306 - RNA, 21 nt, Artificial Sequence
  LRRK2 RNA guide
uuccaagguauuugugucuua

SEQ ID NO: 99307 - RNA, 21 nt, Artificial Sequence
  LRRK2 RNA guide
uucccaaaguuacaauguuaa

SEQ ID NO: 99308 - RNA, 21 nt, Artificial Sequence
  LRRK2 RNA guide
uucuaggugacccuucaauua

SEQ ID NO: 99309 - RNA, 21 nt, Artificial Sequence
  LRRK2 RNA guide
uucuauuuucuaggugacccu

SEQ ID NO: 99310 - RNA, 21 nt, Artificial Sequence
  LRRK2 RNA guide
uucuuuggauaugguaaggua

SEQ ID NO: 99311 - RNA, 21 nt, Artificial Sequence
  LRRK2 RNA guide
uugaagggucaccuagaaaau

SEQ ID NO: 99312 - RNA, 21 nt, Artificial Sequence
  LRRK2 RNA guide
uugacauaguaucaguauauc

SEQ ID NO: 99313 - RNA, 21 nt, Artificial Sequence
  LRRK2 RNA guide
uugcagcaaggaguggaucac

SEQ ID NO: 99314 - RNA, 21 nt, Artificial Sequence
  LRRK2 RNA guide
uugcaucaaaagucuucuaug

SEQ ID NO: 99315 - RNA, 21 nt, Artificial Sequence
  LRRK2 RNA guide
uugcugcaauucuuaauuaug

SEQ ID NO: 99316 - RNA, 21 nt, Artificial Sequence
  LRRK2 RNA guide
uuggauaugguaagguacaaa

SEQ ID NO: 99317 - RNA, 21 nt, Artificial Sequence
  LRRK2 RNA guide
uugggaaggguaauguauaaa

SEQ ID NO: 99318 - RNA, 21 nt, Artificial Sequence
  LRRK2 RNA guide
uuguaacuuugggaaggguaa

SEQ ID NO: 99319 - RNA, 21 nt, Artificial Sequence
  LRRK2 RNA guide
uuguaccuuaccauauccaaa

SEQ ID NO: 99320 - RNA, 21 nt, Artificial Sequence
  LRRK2 RNA guide
uugugaauucaguuccaaggu

SEQ ID NO: 99321 - RNA, 21 nt, Artificial Sequence
  LRRK2 RNA guide
uuuaacauuguaacuuuggga

SEQ ID NO: 99322 - RNA, 21 nt, Artificial Sequence
  LRRK2 RNA guide
uuuaagacacaaauaccuugg

SEQ ID NO: 99323 - RNA, 21 nt, Artificial Sequence
  LRRK2 RNA guide
uuuagauggacacuuagaugg

SEQ ID NO: 99324 - RNA, 21 nt, Artificial Sequence
  LRRK2 RNA guide
uuuauacauuacccuucccaa

SEQ ID NO: 99325 - RNA, 21 nt, Artificial Sequence
  LRRK2 RNA guide
uuucacacacauuaccucguu

SEQ ID NO: 99326 - RNA, 21 nt, Artificial Sequence
  LRRK2 RNA guide
uuucuaggugacccuucaauu

SEQ ID NO: 99327 - RNA, 21 nt, Artificial Sequence
  LRRK2 RNA guide
uuugacauaguaucaguauau

SEQ ID NO: 99328 - RNA, 21 nt, Artificial Sequence
  LRRK2 RNA guide
uuugcaucaaaagucuucuau

SEQ ID NO: 99329 - RNA, 21 nt, Artificial Sequence
  LRRK2 RNA guide
uuuggauaugguaagguacaa

SEQ ID NO: 99330 - RNA, 21 nt, Artificial Sequence
  LRRK2 RNA guide
uuugggaaggguaauguauaa

SEQ ID NO: 99331 - RNA, 21 nt, Artificial Sequence
  LRRK2 RNA guide
uuuguaccuuaccauauccaa

SEQ ID NO: 99332 - RNA, 21 nt, Artificial Sequence
  LRRK2 RNA guide
uuuucacacacauuaccucgu

SEQ ID NO: 99333 - RNA, 21 nt, Artificial Sequence
  LRRK2 RNA guide
uuuucuaggugacccuucaau

SEQ ID NO: 99334 - RNA, 22 nt, Artificial Sequence
  LRRK2 RNA guide
aaaaguucuuuggauaugguaa

SEQ ID NO: 99335 - RNA, 22 nt, Artificial Sequence
  LRRK2 RNA guide
aaaauaacaaaaucugugaucc

SEQ ID NO: 99336 - RNA, 22 nt, Artificial Sequence
  LRRK2 RNA guide
aaaaucugugauccacuccuug

SEQ ID NO: 99337 - RNA, 22 nt, Artificial Sequence
  LRRK2 RNA guide
aaacgagguaaugugugugaaa

SEQ ID NO: 99338 - RNA, 22 nt, Artificial Sequence
  LRRK2 RNA guide
aaagaacuuuucacacacauua

SEQ ID NO: 99339 - RNA, 22 nt, Artificial Sequence
  LRRK2 RNA guide
aaagguuaagcuguuuucucag

SEQ ID NO: 99340 - RNA, 22 nt, Artificial Sequence
  LRRK2 RNA guide
aaaguucuuuggauaugguaag

SEQ ID NO: 99341 - RNA, 22 nt, Artificial Sequence
  LRRK2 RNA guide
aaauaacaaaaucugugaucca

SEQ ID NO: 99342 - RNA, 22 nt, Artificial Sequence
  LRRK2 RNA guide
aaaucugugauccacuccuugc

SEQ ID NO: 99343 - RNA, 22 nt, Artificial Sequence
  LRRK2 RNA guide
aacaaaaucugugauccacucc

SEQ ID NO: 99344 - RNA, 22 nt, Artificial Sequence
  LRRK2 RNA guide
aacauuguaacuuugggaaggg

SEQ ID NO: 99345 - RNA, 22 nt, Artificial Sequence
  LRRK2 RNA guide
aacgagguaaugugugugaaaa

SEQ ID NO: 99346 - RNA, 22 nt, Artificial Sequence
  LRRK2 RNA guide
aacuuuucacacacauuaccuc

SEQ ID NO: 99347 - RNA, 22 nt, Artificial Sequence
  LRRK2 RNA guide
aagaacuuuucacacacauuac

SEQ ID NO: 99348 - RNA, 22 nt, Artificial Sequence
  LRRK2 RNA guide
aagaauugcagcaaggagugga

SEQ ID NO: 99349 - RNA, 22 nt, Artificial Sequence
  LRRK2 RNA guide
aagacacaaauaccuuggaacu

SEQ ID NO: 99350 - RNA, 22 nt, Artificial Sequence
  LRRK2 RNA guide
aagcuguuuucucagacucaca

SEQ ID NO: 99351 - RNA, 22 nt, Artificial Sequence
  LRRK2 RNA guide
aaggaguggaucacagauuuug

SEQ ID NO: 99352 - RNA, 22 nt, Artificial Sequence
  LRRK2 RNA guide
aaggguaauguauaaauacuga

SEQ ID NO: 99353 - RNA, 22 nt, Artificial Sequence
  LRRK2 RNA guide
aagggucaccuagaaaauagaa

SEQ ID NO: 99354 - RNA, 22 nt, Artificial Sequence
  LRRK2 RNA guide
aagguuaagcuguuuucucaga

SEQ ID NO: 99355 - RNA, 22 nt, Artificial Sequence
  LRRK2 RNA guide
aaguucuuuggauaugguaagg

SEQ ID NO: 99356 - RNA, 22 nt, Artificial Sequence
  LRRK2 RNA guide
aauaacaaaaucugugauccac

SEQ ID NO: 99357 - RNA, 22 nt, Artificial Sequence
  LRRK2 RNA guide
aauaccuuggaacugaauucac

SEQ ID NO: 99358 - RNA, 22 nt, Artificial Sequence
  LRRK2 RNA guide
aauagaauugugaauucaguuc

SEQ ID NO: 99359 - RNA, 22 nt, Artificial Sequence
  LRRK2 RNA guide
aauaggcucaguauuuauacau

SEQ ID NO: 99360 - RNA, 22 nt, Artificial Sequence
  LRRK2 RNA guide
aaucugugauccacuccuugcu

SEQ ID NO: 99361 - RNA, 22 nt, Artificial Sequence
  LRRK2 RNA guide
aauguuaaacgagguaaugugu

SEQ ID NO: 99362 - RNA, 22 nt, Artificial Sequence
  LRRK2 RNA guide
aauuaagaauugcagcaaggag

SEQ ID NO: 99363 - RNA, 22 nt, Artificial Sequence
  LRRK2 RNA guide
aauuaugugagucugagaaaac

SEQ ID NO: 99364 - RNA, 22 nt, Artificial Sequence
  LRRK2 RNA guide
aauucaguuccaagguauuugu

SEQ ID NO: 99365 - RNA, 22 nt, Artificial Sequence
  LRRK2 RNA guide
aauucuauuuucuaggugaccc

SEQ ID NO: 99366 - RNA, 22 nt, Artificial Sequence
  LRRK2 RNA guide
aauugaagggucaccuagaaaa

SEQ ID NO: 99367 - RNA, 22 nt, Artificial Sequence
  LRRK2 RNA guide
aauugcagcaaggaguggauca

SEQ ID NO: 99368 - RNA, 22 nt, Artificial Sequence
  LRRK2 RNA guide
acaaaaucugugauccacuccu

SEQ ID NO: 99369 - RNA, 22 nt, Artificial Sequence
  LRRK2 RNA guide
acaaauaccuuggaacugaauu

SEQ ID NO: 99370 - RNA, 22 nt, Artificial Sequence
  LRRK2 RNA guide
acaauguuaaacgagguaaugu

SEQ ID NO: 99371 - RNA, 22 nt, Artificial Sequence
  LRRK2 RNA guide
acaauucuauuuucuaggugac

SEQ ID NO: 99372 - RNA, 22 nt, Artificial Sequence
  LRRK2 RNA guide
acacaaauaccuuggaacugaa

SEQ ID NO: 99373 - RNA, 22 nt, Artificial Sequence
  LRRK2 RNA guide
acacacauuaccucguuuaaca

SEQ ID NO: 99374 - RNA, 22 nt, Artificial Sequence
  LRRK2 RNA guide
acacauuaccucguuuaacauu

SEQ ID NO: 99375 - RNA, 22 nt, Artificial Sequence
  LRRK2 RNA guide
acacuuagauggauggauauac

SEQ ID NO: 99376 - RNA, 22 nt, Artificial Sequence
  LRRK2 RNA guide
acagcuuaaccuuucuauaaaa

SEQ ID NO: 99377 - RNA, 22 nt, Artificial Sequence
  LRRK2 RNA guide
acauaauuaagaauugcagcaa

SEQ ID NO: 99378 - RNA, 22 nt, Artificial Sequence
  LRRK2 RNA guide
acauaguaucaguauauccauc

SEQ ID NO: 99379 - RNA, 22 nt, Artificial Sequence
  LRRK2 RNA guide
acauuacccuucccaaaguuac

SEQ ID NO: 99380 - RNA, 22 nt, Artificial Sequence
  LRRK2 RNA guide
acauuguaacuuugggaagggu

SEQ ID NO: 99381 - RNA, 22 nt, Artificial Sequence
  LRRK2 RNA guide
accauauccaaagaacuuuuca

SEQ ID NO: 99382 - RNA, 22 nt, Artificial Sequence
  LRRK2 RNA guide
acccuucccaaaguuacaaugu

SEQ ID NO: 99383 - RNA, 22 nt, Artificial Sequence
  LRRK2 RNA guide
accucguuuaacauuguaacuu

SEQ ID NO: 99384 - RNA, 22 nt, Artificial Sequence
  LRRK2 RNA guide
accuuaccauauccaaagaacu

SEQ ID NO: 99385 - RNA, 22 nt, Artificial Sequence
  LRRK2 RNA guide
accuuggaacugaauucacaau

SEQ ID NO: 99386 - RNA, 22 nt, Artificial Sequence
  LRRK2 RNA guide
acgagguaaugugugugaaaag

SEQ ID NO: 99387 - RNA, 22 nt, Artificial Sequence
  LRRK2 RNA guide
acucacauaauuaagaauugca

SEQ ID NO: 99388 - RNA, 22 nt, Artificial Sequence
  LRRK2 RNA guide
acucauauuuguaccuuaccau

SEQ ID NO: 99389 - RNA, 22 nt, Artificial Sequence
  LRRK2 RNA guide
acuccuugcugcaauucuuaau

SEQ ID NO: 99390 - RNA, 22 nt, Artificial Sequence
  LRRK2 RNA guide
acuuagauggauggauauacug

SEQ ID NO: 99391 - RNA, 22 nt, Artificial Sequence
  LRRK2 RNA guide
acuuugggaaggguaauguaua

SEQ ID NO: 99392 - RNA, 22 nt, Artificial Sequence
  LRRK2 RNA guide
acuuuucacacacauuaccucg

SEQ ID NO: 99393 - RNA, 22 nt, Artificial Sequence
  LRRK2 RNA guide
agaaagguuaagcuguuuucuc

SEQ ID NO: 99394 - RNA, 22 nt, Artificial Sequence
  LRRK2 RNA guide
agaacuuuucacacacauuacc

SEQ ID NO: 99395 - RNA, 22 nt, Artificial Sequence
  LRRK2 RNA guide
agaauugcagcaaggaguggau

SEQ ID NO: 99396 - RNA, 22 nt, Artificial Sequence
  LRRK2 RNA guide
agaauugugaauucaguuccaa

SEQ ID NO: 99397 - RNA, 22 nt, Artificial Sequence
  LRRK2 RNA guide
agacacaaauaccuuggaacug

SEQ ID NO: 99398 - RNA, 22 nt, Artificial Sequence
  LRRK2 RNA guide
agacucacauaauuaagaauug

SEQ ID NO: 99399 - RNA, 22 nt, Artificial Sequence
  LRRK2 RNA guide
agauggacacuuagauggaugg

SEQ ID NO: 99400 - RNA, 22 nt, Artificial Sequence
  LRRK2 RNA guide
agauggauggauauacugauac

SEQ ID NO: 99401 - RNA, 22 nt, Artificial Sequence
  LRRK2 RNA guide
agcaaggaguggaucacagauu

SEQ ID NO: 99402 - RNA, 22 nt, Artificial Sequence
  LRRK2 RNA guide
agccuauuuuauagaaagguua

SEQ ID NO: 99403 - RNA, 22 nt, Artificial Sequence
  LRRK2 RNA guide
agcuguuuucucagacucacau

SEQ ID NO: 99404 - RNA, 22 nt, Artificial Sequence
  LRRK2 RNA guide
agcuuaaccuuucuauaaaaua

SEQ ID NO: 99405 - RNA, 22 nt, Artificial Sequence
  LRRK2 RNA guide
aggaguggaucacagauuuugu

SEQ ID NO: 99406 - RNA, 22 nt, Artificial Sequence
  LRRK2 RNA guide
aggcucaguauuuauacauuac

SEQ ID NO: 99407 - RNA, 22 nt, Artificial Sequence
  LRRK2 RNA guide
agggccuacauagaagacuuuu

SEQ ID NO: 99408 - RNA, 22 nt, Artificial Sequence
  LRRK2 RNA guide
aggguaauguauaaauacugag

SEQ ID NO: 99409 - RNA, 22 nt, Artificial Sequence
  LRRK2 RNA guide
agggucaccuagaaaauagaau

SEQ ID NO: 99410 - RNA, 22 nt, Artificial Sequence
  LRRK2 RNA guide
agguaaugugugugaaaaguuc

SEQ ID NO: 99411 - RNA, 22 nt, Artificial Sequence
  LRRK2 RNA guide
agguuaagcuguuuucucagac

SEQ ID NO: 99412 - RNA, 22 nt, Artificial Sequence
  LRRK2 RNA guide
aguauauccauccaucuaagug

SEQ ID NO: 99413 - RNA, 22 nt, Artificial Sequence
  LRRK2 RNA guide
aguaucaguauauccauccauc

SEQ ID NO: 99414 - RNA, 22 nt, Artificial Sequence
  LRRK2 RNA guide
aguauuuagauggacacuuaga

SEQ ID NO: 99415 - RNA, 22 nt, Artificial Sequence
  LRRK2 RNA guide
aguauuuauacauuacccuucc

SEQ ID NO: 99416 - RNA, 22 nt, Artificial Sequence
  LRRK2 RNA guide
agucugagaaaacagcuuaacc

SEQ ID NO: 99417 - RNA, 22 nt, Artificial Sequence
  LRRK2 RNA guide
aguuacaauguuaaacgaggua

SEQ ID NO: 99418 - RNA, 22 nt, Artificial Sequence
  LRRK2 RNA guide
aguuccaagguauuugugucuu

SEQ ID NO: 99419 - RNA, 22 nt, Artificial Sequence
  LRRK2 RNA guide
aguucuuuggauaugguaaggu

SEQ ID NO: 99420 - RNA, 22 nt, Artificial Sequence
  LRRK2 RNA guide
aguuuaagacacaaauaccuug

SEQ ID NO: 99421 - RNA, 22 nt, Artificial Sequence
  LRRK2 RNA guide
auaacaaaaucugugauccacu

SEQ ID NO: 99422 - RNA, 22 nt, Artificial Sequence
  LRRK2 RNA guide
auaauuaagaauugcagcaagg

SEQ ID NO: 99423 - RNA, 22 nt, Artificial Sequence
  LRRK2 RNA guide
auaauugaagggucaccuagaa

SEQ ID NO: 99424 - RNA, 22 nt, Artificial Sequence
  LRRK2 RNA guide
auacauuacccuucccaaaguu

SEQ ID NO: 99425 - RNA, 22 nt, Artificial Sequence
  LRRK2 RNA guide
auaccuuggaacugaauucaca

SEQ ID NO: 99426 - RNA, 22 nt, Artificial Sequence
  LRRK2 RNA guide
auagaaagguuaagcuguuuuc

SEQ ID NO: 99427 - RNA, 22 nt, Artificial Sequence
  LRRK2 RNA guide
auagaauugugaauucaguucc

SEQ ID NO: 99428 - RNA, 22 nt, Artificial Sequence
  LRRK2 RNA guide
auaggcucaguauuuauacauu

SEQ ID NO: 99429 - RNA, 22 nt, Artificial Sequence
  LRRK2 RNA guide
auauccauccaucuaagugucc

SEQ ID NO: 99430 - RNA, 22 nt, Artificial Sequence
  LRRK2 RNA guide
aucaaaagucuucuauguaggc

SEQ ID NO: 99431 - RNA, 22 nt, Artificial Sequence
  LRRK2 RNA guide
aucaguauauccauccaucuaa

SEQ ID NO: 99432 - RNA, 22 nt, Artificial Sequence
  LRRK2 RNA guide
auccaaagaacuuuucacacac

SEQ ID NO: 99433 - RNA, 22 nt, Artificial Sequence
  LRRK2 RNA guide
auccacuccuugcugcaauucu

SEQ ID NO: 99434 - RNA, 22 nt, Artificial Sequence
  LRRK2 RNA guide
auccauccaucuaaguguccau

SEQ ID NO: 99435 - RNA, 22 nt, Artificial Sequence
  LRRK2 RNA guide
auccaucuaaguguccaucuaa

SEQ ID NO: 99436 - RNA, 22 nt, Artificial Sequence
  LRRK2 RNA guide
aucugugauccacuccuugcug

SEQ ID NO: 99437 - RNA, 22 nt, Artificial Sequence
  LRRK2 RNA guide
augaguauuuagauggacacuu

SEQ ID NO: 99438 - RNA, 22 nt, Artificial Sequence
  LRRK2 RNA guide
auggacacuuagauggauggau

SEQ ID NO: 99439 - RNA, 22 nt, Artificial Sequence
  LRRK2 RNA guide
auggauggauauacugauacua

SEQ ID NO: 99440 - RNA, 22 nt, Artificial Sequence
  LRRK2 RNA guide
augugagucugagaaaacagcu

SEQ ID NO: 99441 - RNA, 22 nt, Artificial Sequence
  LRRK2 RNA guide
augugugugaaaaguucuuugg

SEQ ID NO: 99442 - RNA, 22 nt, Artificial Sequence
  LRRK2 RNA guide
auguuaaacgagguaaugugug

SEQ ID NO: 99443 - RNA, 22 nt, Artificial Sequence
  LRRK2 RNA guide
auuaagaauugcagcaaggagu

SEQ ID NO: 99444 - RNA, 22 nt, Artificial Sequence
  LRRK2 RNA guide
auuacccuucccaaaguuacaa

SEQ ID NO: 99445 - RNA, 22 nt, Artificial Sequence
  LRRK2 RNA guide
auuaugugagucugagaaaaca

SEQ ID NO: 99446 - RNA, 22 nt, Artificial Sequence
  LRRK2 RNA guide
auucaauauaauugaaggguca

SEQ ID NO: 99447 - RNA, 22 nt, Artificial Sequence
  LRRK2 RNA guide
auucacaauucuauuuucuagg

SEQ ID NO: 99448 - RNA, 22 nt, Artificial Sequence
  LRRK2 RNA guide
auucaguuccaagguauuugug

SEQ ID NO: 99449 - RNA, 22 nt, Artificial Sequence
  LRRK2 RNA guide
auucuauuuucuaggugacccu

SEQ ID NO: 99450 - RNA, 22 nt, Artificial Sequence
  LRRK2 RNA guide
auugaagggucaccuagaaaau

SEQ ID NO: 99451 - RNA, 22 nt, Artificial Sequence
  LRRK2 RNA guide
auugcagcaaggaguggaucac

SEQ ID NO: 99452 - RNA, 22 nt, Artificial Sequence
  LRRK2 RNA guide
auuguaacuuugggaaggguaa

SEQ ID NO: 99453 - RNA, 22 nt, Artificial Sequence
  LRRK2 RNA guide
auugugaauucaguuccaaggu

SEQ ID NO: 99454 - RNA, 22 nt, Artificial Sequence
  LRRK2 RNA guide
auuuagauggacacuuagaugg

SEQ ID NO: 99455 - RNA, 22 nt, Artificial Sequence
  LRRK2 RNA guide
auuugcaucaaaagucuucuau

SEQ ID NO: 99456 - RNA, 22 nt, Artificial Sequence
  LRRK2 RNA guide
auuuguaccuuaccauauccaa

SEQ ID NO: 99457 - RNA, 22 nt, Artificial Sequence
  LRRK2 RNA guide
caaaagucuucuauguaggccc

SEQ ID NO: 99458 - RNA, 22 nt, Artificial Sequence
  LRRK2 RNA guide
caaaaucugugauccacuccuu

SEQ ID NO: 99459 - RNA, 22 nt, Artificial Sequence
  LRRK2 RNA guide
caaagaacuuuucacacacauu

SEQ ID NO: 99460 - RNA, 22 nt, Artificial Sequence
  LRRK2 RNA guide
caaauaccuuggaacugaauuc

SEQ ID NO: 99461 - RNA, 22 nt, Artificial Sequence
  LRRK2 RNA guide
caaggaguggaucacagauuuu

SEQ ID NO: 99462 - RNA, 22 nt, Artificial Sequence
  LRRK2 RNA guide
caauauaauugaagggucaccu

SEQ ID NO: 99463 - RNA, 22 nt, Artificial Sequence
  LRRK2 RNA guide
caauguuaaacgagguaaugug

SEQ ID NO: 99464 - RNA, 22 nt, Artificial Sequence
  LRRK2 RNA guide
caauucuauuuucuaggugacc

SEQ ID NO: 99465 - RNA, 22 nt, Artificial Sequence
  LRRK2 RNA guide
cacaaauaccuuggaacugaau

SEQ ID NO: 99466 - RNA, 22 nt, Artificial Sequence
  LRRK2 RNA guide
cacaauucuauuuucuagguga

SEQ ID NO: 99467 - RNA, 22 nt, Artificial Sequence
  LRRK2 RNA guide
cacacacauuaccucguuuaac

SEQ ID NO: 99468 - RNA, 22 nt, Artificial Sequence
  LRRK2 RNA guide
cacacauuaccucguuuaacau

SEQ ID NO: 99469 - RNA, 22 nt, Artificial Sequence
  LRRK2 RNA guide
cacauaauuaagaauugcagca

SEQ ID NO: 99470 - RNA, 22 nt, Artificial Sequence
  LRRK2 RNA guide
cacauuaccucguuuaacauug

SEQ ID NO: 99471 - RNA, 22 nt, Artificial Sequence
  LRRK2 RNA guide
cacuccuugcugcaauucuuaa

SEQ ID NO: 99472 - RNA, 22 nt, Artificial Sequence
  LRRK2 RNA guide
cacuuagauggauggauauacu

SEQ ID NO: 99473 - RNA, 22 nt, Artificial Sequence
  LRRK2 RNA guide
cagacucacauaauuaagaauu

SEQ ID NO: 99474 - RNA, 22 nt, Artificial Sequence
  LRRK2 RNA guide
cagcaaggaguggaucacagau

SEQ ID NO: 99475 - RNA, 22 nt, Artificial Sequence
  LRRK2 RNA guide
cagcuuaaccuuucuauaaaau

SEQ ID NO: 99476 - RNA, 22 nt, Artificial Sequence
  LRRK2 RNA guide
caguauauccauccaucuaagu

SEQ ID NO: 99477 - RNA, 22 nt, Artificial Sequence
  LRRK2 RNA guide
caguauuuauacauuacccuuc

SEQ ID NO: 99478 - RNA, 22 nt, Artificial Sequence
  LRRK2 RNA guide
caguuccaagguauuugugucu

SEQ ID NO: 99479 - RNA, 22 nt, Artificial Sequence
  LRRK2 RNA guide
cauaauuaagaauugcagcaag

SEQ ID NO: 99480 - RNA, 22 nt, Artificial Sequence
  LRRK2 RNA guide
cauaguaucaguauauccaucc

SEQ ID NO: 99481 - RNA, 22 nt, Artificial Sequence
  LRRK2 RNA guide
cauaguuuaagacacaaauacc

SEQ ID NO: 99482 - RNA, 22 nt, Artificial Sequence
  LRRK2 RNA guide
cauauccaaagaacuuuucaca

SEQ ID NO: 99483 - RNA, 22 nt, Artificial Sequence
  LRRK2 RNA guide
cauauuuguaccuuaccauauc

SEQ ID NO: 99484 - RNA, 22 nt, Artificial Sequence
  LRRK2 RNA guide
caucaaaagucuucuauguagg

SEQ ID NO: 99485 - RNA, 22 nt, Artificial Sequence
  LRRK2 RNA guide
cauccaucuaaguguccaucua

SEQ ID NO: 99486 - RNA, 22 nt, Artificial Sequence
  LRRK2 RNA guide
caucuaaguguccaucuaaaua

SEQ ID NO: 99487 - RNA, 22 nt, Artificial Sequence
  LRRK2 RNA guide
cauuacccuucccaaaguuaca

SEQ ID NO: 99488 - RNA, 22 nt, Artificial Sequence
  LRRK2 RNA guide
cauuguaacuuugggaagggua

SEQ ID NO: 99489 - RNA, 22 nt, Artificial Sequence
  LRRK2 RNA guide
ccaaagaacuuuucacacacau

SEQ ID NO: 99490 - RNA, 22 nt, Artificial Sequence
  LRRK2 RNA guide
ccaaaguuacaauguuaaacga

SEQ ID NO: 99491 - RNA, 22 nt, Artificial Sequence
  LRRK2 RNA guide
ccaagguauuugugucuuaaac

SEQ ID NO: 99492 - RNA, 22 nt, Artificial Sequence
  LRRK2 RNA guide
ccacuccuugcugcaauucuua

SEQ ID NO: 99493 - RNA, 22 nt, Artificial Sequence
  LRRK2 RNA guide
ccauauccaaagaacuuuucac

SEQ ID NO: 99494 - RNA, 22 nt, Artificial Sequence
  LRRK2 RNA guide
ccauccaucuaaguguccaucu

SEQ ID NO: 99495 - RNA, 22 nt, Artificial Sequence
  LRRK2 RNA guide
ccaucuaaguguccaucuaaau

SEQ ID NO: 99496 - RNA, 22 nt, Artificial Sequence
  LRRK2 RNA guide
cccaaaguuacaauguuaaacg

SEQ ID NO: 99497 - RNA, 22 nt, Artificial Sequence
  LRRK2 RNA guide
cccuucccaaaguuacaauguu

SEQ ID NO: 99498 - RNA, 22 nt, Artificial Sequence
  LRRK2 RNA guide
ccuacauagaagacuuuugaug

SEQ ID NO: 99499 - RNA, 22 nt, Artificial Sequence
  LRRK2 RNA guide
ccuagggccuacauagaagacu

SEQ ID NO: 99500 - RNA, 22 nt, Artificial Sequence
  LRRK2 RNA guide
ccucguuuaacauuguaacuuu

SEQ ID NO: 99501 - RNA, 22 nt, Artificial Sequence
  LRRK2 RNA guide
ccuuaccauauccaaagaacuu

SEQ ID NO: 99502 - RNA, 22 nt, Artificial Sequence
  LRRK2 RNA guide
ccuucccaaaguuacaauguua

SEQ ID NO: 99503 - RNA, 22 nt, Artificial Sequence
  LRRK2 RNA guide
ccuugcugcaauucuuaauuau

SEQ ID NO: 99504 - RNA, 22 nt, Artificial Sequence
  LRRK2 RNA guide
ccuuggaacugaauucacaauu

SEQ ID NO: 99505 - RNA, 22 nt, Artificial Sequence
  LRRK2 RNA guide
cgagguaaugugugugaaaagu

SEQ ID NO: 99506 - RNA, 22 nt, Artificial Sequence
  LRRK2 RNA guide
cguuuaacauuguaacuuuggg

SEQ ID NO: 99507 - RNA, 22 nt, Artificial Sequence
  LRRK2 RNA guide
cuagggccuacauagaagacuu

SEQ ID NO: 99508 - RNA, 22 nt, Artificial Sequence
  LRRK2 RNA guide
cuaggugacccuucaauuauau

SEQ ID NO: 99509 - RNA, 22 nt, Artificial Sequence
  LRRK2 RNA guide
cuauuuucuaggugacccuuca

SEQ ID NO: 99510 - RNA, 22 nt, Artificial Sequence
  LRRK2 RNA guide
cucacauaauuaagaauugcag

SEQ ID NO: 99511 - RNA, 22 nt, Artificial Sequence
  LRRK2 RNA guide
cucagacucacauaauuaagaa

SEQ ID NO: 99512 - RNA, 22 nt, Artificial Sequence
  LRRK2 RNA guide
cucaguauuuauacauuacccu

SEQ ID NO: 99513 - RNA, 22 nt, Artificial Sequence
  LRRK2 RNA guide
cucauauuuguaccuuaccaua

SEQ ID NO: 99514 - RNA, 22 nt, Artificial Sequence
  LRRK2 RNA guide
cuccuugcugcaauucuuaauu

SEQ ID NO: 99515 - RNA, 22 nt, Artificial Sequence
  LRRK2 RNA guide
cucguuuaacauuguaacuuug

SEQ ID NO: 99516 - RNA, 22 nt, Artificial Sequence
  LRRK2 RNA guide
cugagaaaacagcuuaaccuuu

SEQ ID NO: 99517 - RNA, 22 nt, Artificial Sequence
  LRRK2 RNA guide
cugagccuauuuuauagaaagg

SEQ ID NO: 99518 - RNA, 22 nt, Artificial Sequence
  LRRK2 RNA guide
cugcaauucuuaauuaugugag

SEQ ID NO: 99519 - RNA, 22 nt, Artificial Sequence
  LRRK2 RNA guide
cugugauccacuccuugcugca

SEQ ID NO: 99520 - RNA, 22 nt, Artificial Sequence
  LRRK2 RNA guide
cuguuuucucagacucacauaa

SEQ ID NO: 99521 - RNA, 22 nt, Artificial Sequence
  LRRK2 RNA guide
cuuaaccuuucuauaaaauagg

SEQ ID NO: 99522 - RNA, 22 nt, Artificial Sequence
  LRRK2 RNA guide
cuuaauuaugugagucugagaa

SEQ ID NO: 99523 - RNA, 22 nt, Artificial Sequence
  LRRK2 RNA guide
cuuaccauauccaaagaacuuu

SEQ ID NO: 99524 - RNA, 22 nt, Artificial Sequence
  LRRK2 RNA guide
cuuagauggauggauauacuga

SEQ ID NO: 99525 - RNA, 22 nt, Artificial Sequence
  LRRK2 RNA guide
cuucccaaaguuacaauguuaa

SEQ ID NO: 99526 - RNA, 22 nt, Artificial Sequence
  LRRK2 RNA guide
cuugcugcaauucuuaauuaug

SEQ ID NO: 99527 - RNA, 22 nt, Artificial Sequence
  LRRK2 RNA guide
cuuuggauaugguaagguacaa

SEQ ID NO: 99528 - RNA, 22 nt, Artificial Sequence
  LRRK2 RNA guide
cuuugggaaggguaauguauaa

SEQ ID NO: 99529 - RNA, 22 nt, Artificial Sequence
  LRRK2 RNA guide
cuuuucacacacauuaccucgu

SEQ ID NO: 99530 - RNA, 22 nt, Artificial Sequence
  LRRK2 RNA guide
gaaaaguucuuuggauauggua

SEQ ID NO: 99531 - RNA, 22 nt, Artificial Sequence
  LRRK2 RNA guide
gaaagguuaagcuguuuucuca

SEQ ID NO: 99532 - RNA, 22 nt, Artificial Sequence
  LRRK2 RNA guide
gaacuuuucacacacauuaccu

SEQ ID NO: 99533 - RNA, 22 nt, Artificial Sequence
  LRRK2 RNA guide
gaaggguaauguauaaauacug

SEQ ID NO: 99534 - RNA, 22 nt, Artificial Sequence
  LRRK2 RNA guide
gaagggucaccuagaaaauaga

SEQ ID NO: 99535 - RNA, 22 nt, Artificial Sequence
  LRRK2 RNA guide
gaauucaguuccaagguauuug

SEQ ID NO: 99536 - RNA, 22 nt, Artificial Sequence
  LRRK2 RNA guide
gaauugcagcaaggaguggauc

SEQ ID NO: 99537 - RNA, 22 nt, Artificial Sequence
  LRRK2 RNA guide
gaauugugaauucaguuccaag

SEQ ID NO: 99538 - RNA, 22 nt, Artificial Sequence
  LRRK2 RNA guide
gacacaaauaccuuggaacuga

SEQ ID NO: 99539 - RNA, 22 nt, Artificial Sequence
  LRRK2 RNA guide
gacacuuagauggauggauaua

SEQ ID NO: 99540 - RNA, 22 nt, Artificial Sequence
  LRRK2 RNA guide
gacauaguaucaguauauccau

SEQ ID NO: 99541 - RNA, 22 nt, Artificial Sequence
  LRRK2 RNA guide
gacucacauaauuaagaauugc

SEQ ID NO: 99542 - RNA, 22 nt, Artificial Sequence
  LRRK2 RNA guide
gagccuauuuuauagaaagguu

SEQ ID NO: 99543 - RNA, 22 nt, Artificial Sequence
  LRRK2 RNA guide
gagguaaugugugugaaaaguu

SEQ ID NO: 99544 - RNA, 22 nt, Artificial Sequence
  LRRK2 RNA guide
gaguauuuagauggacacuuag

SEQ ID NO: 99545 - RNA, 22 nt, Artificial Sequence
  LRRK2 RNA guide
gagucugagaaaacagcuuaac

SEQ ID NO: 99546 - RNA, 22 nt, Artificial Sequence
  LRRK2 RNA guide
gauccacuccuugcugcaauuc

SEQ ID NO: 99547 - RNA, 22 nt, Artificial Sequence
  LRRK2 RNA guide
gauggacacuuagauggaugga

SEQ ID NO: 99548 - RNA, 22 nt, Artificial Sequence
  LRRK2 RNA guide
gauggauggauauacugauacu

SEQ ID NO: 99549 - RNA, 22 nt, Artificial Sequence
  LRRK2 RNA guide
gcaaggaguggaucacagauuu

SEQ ID NO: 99550 - RNA, 22 nt, Artificial Sequence
  LRRK2 RNA guide
gcaauucuuaauuaugugaguc

SEQ ID NO: 99551 - RNA, 22 nt, Artificial Sequence
  LRRK2 RNA guide
gcagcaaggaguggaucacaga

SEQ ID NO: 99552 - RNA, 22 nt, Artificial Sequence
  LRRK2 RNA guide
gcaucaaaagucuucuauguag

SEQ ID NO: 99553 - RNA, 22 nt, Artificial Sequence
  LRRK2 RNA guide
gccuacauagaagacuuuugau

SEQ ID NO: 99554 - RNA, 22 nt, Artificial Sequence
  LRRK2 RNA guide
gccuagggccuacauagaagac

SEQ ID NO: 99555 - RNA, 22 nt, Artificial Sequence
  LRRK2 RNA guide
gccuauuuuauagaaagguuaa

SEQ ID NO: 99556 - RNA, 22 nt, Artificial Sequence
  LRRK2 RNA guide
gcucaguauuuauacauuaccc

SEQ ID NO: 99557 - RNA, 22 nt, Artificial Sequence
  LRRK2 RNA guide
gcugcaauucuuaauuauguga

SEQ ID NO: 99558 - RNA, 22 nt, Artificial Sequence
  LRRK2 RNA guide
gcuguuuucucagacucacaua

SEQ ID NO: 99559 - RNA, 22 nt, Artificial Sequence
  LRRK2 RNA guide
gcuuaaccuuucuauaaaauag

SEQ ID NO: 99560 - RNA, 22 nt, Artificial Sequence
  LRRK2 RNA guide
ggaaggguaauguauaaauacu

SEQ ID NO: 99561 - RNA, 22 nt, Artificial Sequence
  LRRK2 RNA guide
ggacacuuagauggauggauau

SEQ ID NO: 99562 - RNA, 22 nt, Artificial Sequence
  LRRK2 RNA guide
ggaguggaucacagauuuuguu

SEQ ID NO: 99563 - RNA, 22 nt, Artificial Sequence
  LRRK2 RNA guide
ggauaugguaagguacaaauau

SEQ ID NO: 99564 - RNA, 22 nt, Artificial Sequence
  LRRK2 RNA guide
ggauggauauacugauacuaug

SEQ ID NO: 99565 - RNA, 22 nt, Artificial Sequence
  LRRK2 RNA guide
ggccuacauagaagacuuuuga

SEQ ID NO: 99566 - RNA, 22 nt, Artificial Sequence
  LRRK2 RNA guide
ggcucaguauuuauacauuacc

SEQ ID NO: 99567 - RNA, 22 nt, Artificial Sequence
  LRRK2 RNA guide
gggaaggguaauguauaaauac

SEQ ID NO: 99568 - RNA, 22 nt, Artificial Sequence
  LRRK2 RNA guide
gggccuacauagaagacuuuug

SEQ ID NO: 99569 - RNA, 22 nt, Artificial Sequence
  LRRK2 RNA guide
ggguaauguauaaauacugagc

SEQ ID NO: 99570 - RNA, 22 nt, Artificial Sequence
  LRRK2 RNA guide
gggucaccuagaaaauagaauu

SEQ ID NO: 99571 - RNA, 22 nt, Artificial Sequence
  LRRK2 RNA guide
gguaaugugugugaaaaguucu

SEQ ID NO: 99572 - RNA, 22 nt, Artificial Sequence
  LRRK2 RNA guide
ggucaccuagaaaauagaauug

SEQ ID NO: 99573 - RNA, 22 nt, Artificial Sequence
  LRRK2 RNA guide
gguuaagcuguuuucucagacu

SEQ ID NO: 99574 - RNA, 22 nt, Artificial Sequence
  LRRK2 RNA guide
guaacuuugggaaggguaaugu

SEQ ID NO: 99575 - RNA, 22 nt, Artificial Sequence
  LRRK2 RNA guide
guaaugugugugaaaaguucuu

SEQ ID NO: 99576 - RNA, 22 nt, Artificial Sequence
  LRRK2 RNA guide
guaccuuaccauauccaaagaa

SEQ ID NO: 99577 - RNA, 22 nt, Artificial Sequence
  LRRK2 RNA guide
guauauccauccaucuaagugu

SEQ ID NO: 99578 - RNA, 22 nt, Artificial Sequence
  LRRK2 RNA guide
guaucaguauauccauccaucu

SEQ ID NO: 99579 - RNA, 22 nt, Artificial Sequence
  LRRK2 RNA guide
guauuuagauggacacuuagau

SEQ ID NO: 99580 - RNA, 22 nt, Artificial Sequence
  LRRK2 RNA guide
guauuuauacauuacccuuccc

SEQ ID NO: 99581 - RNA, 22 nt, Artificial Sequence
  LRRK2 RNA guide
gucugagaaaacagcuuaaccu

SEQ ID NO: 99582 - RNA, 22 nt, Artificial Sequence
  LRRK2 RNA guide
gugaaaaguucuuuggauaugg

SEQ ID NO: 99583 - RNA, 22 nt, Artificial Sequence
  LRRK2 RNA guide
gugaauucaguuccaagguauu

SEQ ID NO: 99584 - RNA, 22 nt, Artificial Sequence
  LRRK2 RNA guide
gugagucugagaaaacagcuua

SEQ ID NO: 99585 - RNA, 22 nt, Artificial Sequence
  LRRK2 RNA guide
gugauccacuccuugcugcaau

SEQ ID NO: 99586 - RNA, 22 nt, Artificial Sequence
  LRRK2 RNA guide
gugugaaaaguucuuuggauau

SEQ ID NO: 99587 - RNA, 22 nt, Artificial Sequence
  LRRK2 RNA guide
gugugugaaaaguucuuuggau

SEQ ID NO: 99588 - RNA, 22 nt, Artificial Sequence
  LRRK2 RNA guide
guuaaacgagguaaugugugug

SEQ ID NO: 99589 - RNA, 22 nt, Artificial Sequence
  LRRK2 RNA guide
guuaagcuguuuucucagacuc

SEQ ID NO: 99590 - RNA, 22 nt, Artificial Sequence
  LRRK2 RNA guide
guuacaauguuaaacgagguaa

SEQ ID NO: 99591 - RNA, 22 nt, Artificial Sequence
  LRRK2 RNA guide
guuccaagguauuugugucuua

SEQ ID NO: 99592 - RNA, 22 nt, Artificial Sequence
  LRRK2 RNA guide
guucuuuggauaugguaaggua

SEQ ID NO: 99593 - RNA, 22 nt, Artificial Sequence
  LRRK2 RNA guide
guuuaacauuguaacuuuggga

SEQ ID NO: 99594 - RNA, 22 nt, Artificial Sequence
  LRRK2 RNA guide
guuuaagacacaaauaccuugg

SEQ ID NO: 99595 - RNA, 22 nt, Artificial Sequence
  LRRK2 RNA guide
uaaacgagguaaugugugugaa

SEQ ID NO: 99596 - RNA, 22 nt, Artificial Sequence
  LRRK2 RNA guide
uaacaaaaucugugauccacuc

SEQ ID NO: 99597 - RNA, 22 nt, Artificial Sequence
  LRRK2 RNA guide
uaacauuguaacuuugggaagg

SEQ ID NO: 99598 - RNA, 22 nt, Artificial Sequence
  LRRK2 RNA guide
uaagaauugcagcaaggagugg

SEQ ID NO: 99599 - RNA, 22 nt, Artificial Sequence
  LRRK2 RNA guide
uaagacacaaauaccuuggaac

SEQ ID NO: 99600 - RNA, 22 nt, Artificial Sequence
  LRRK2 RNA guide
uaagcuguuuucucagacucac

SEQ ID NO: 99601 - RNA, 22 nt, Artificial Sequence
  LRRK2 RNA guide
uaauuaagaauugcagcaagga

SEQ ID NO: 99602 - RNA, 22 nt, Artificial Sequence
  LRRK2 RNA guide
uaauuaugugagucugagaaaa

SEQ ID NO: 99603 - RNA, 22 nt, Artificial Sequence
  LRRK2 RNA guide
uaauugaagggucaccuagaaa

SEQ ID NO: 99604 - RNA, 22 nt, Artificial Sequence
  LRRK2 RNA guide
uacaauguuaaacgagguaaug

SEQ ID NO: 99605 - RNA, 22 nt, Artificial Sequence
  LRRK2 RNA guide
uacauuacccuucccaaaguua

SEQ ID NO: 99606 - RNA, 22 nt, Artificial Sequence
  LRRK2 RNA guide
uaccauauccaaagaacuuuuc

SEQ ID NO: 99607 - RNA, 22 nt, Artificial Sequence
  LRRK2 RNA guide
uacccuucccaaaguuacaaug

SEQ ID NO: 99608 - RNA, 22 nt, Artificial Sequence
  LRRK2 RNA guide
uaccucguuuaacauuguaacu

SEQ ID NO: 99609 - RNA, 22 nt, Artificial Sequence
  LRRK2 RNA guide
uaccuuaccauauccaaagaac

SEQ ID NO: 99610 - RNA, 22 nt, Artificial Sequence
  LRRK2 RNA guide
uaccuuggaacugaauucacaa

SEQ ID NO: 99611 - RNA, 22 nt, Artificial Sequence
  LRRK2 RNA guide
uacucauauuuguaccuuacca

SEQ ID NO: 99612 - RNA, 22 nt, Artificial Sequence
  LRRK2 RNA guide
uagaaagguuaagcuguuuucu

SEQ ID NO: 99613 - RNA, 22 nt, Artificial Sequence
  LRRK2 RNA guide
uagaauugugaauucaguucca

SEQ ID NO: 99614 - RNA, 22 nt, Artificial Sequence
  LRRK2 RNA guide
uagauggacacuuagauggaug

SEQ ID NO: 99615 - RNA, 22 nt, Artificial Sequence
  LRRK2 RNA guide
uagauggauggauauacugaua

SEQ ID NO: 99616 - RNA, 22 nt, Artificial Sequence
  LRRK2 RNA guide
uaggcucaguauuuauacauua

SEQ ID NO: 99617 - RNA, 22 nt, Artificial Sequence
  LRRK2 RNA guide
uagggccuacauagaagacuuu

SEQ ID NO: 99618 - RNA, 22 nt, Artificial Sequence
  LRRK2 RNA guide
uaguaucaguauauccauccau

SEQ ID NO: 99619 - RNA, 22 nt, Artificial Sequence
  LRRK2 RNA guide
uaguuuaagacacaaauaccuu

SEQ ID NO: 99620 - RNA, 22 nt, Artificial Sequence
  LRRK2 RNA guide
uauacauuacccuucccaaagu

SEQ ID NO: 99621 - RNA, 22 nt, Artificial Sequence
  LRRK2 RNA guide
uauagaaagguuaagcuguuuu

SEQ ID NO: 99622 - RNA, 22 nt, Artificial Sequence
  LRRK2 RNA guide
uauauccauccaucuaaguguc

SEQ ID NO: 99623 - RNA, 22 nt, Artificial Sequence
  LRRK2 RNA guide
uaucaguauauccauccaucua

SEQ ID NO: 99624 - RNA, 22 nt, Artificial Sequence
  LRRK2 RNA guide
uauccauccaucuaagugucca

SEQ ID NO: 99625 - RNA, 22 nt, Artificial Sequence
  LRRK2 RNA guide
uaugugagucugagaaaacagc

SEQ ID NO: 99626 - RNA, 22 nt, Artificial Sequence
  LRRK2 RNA guide
uauuuagauggacacuuagaug

SEQ ID NO: 99627 - RNA, 22 nt, Artificial Sequence
  LRRK2 RNA guide
ucaaaagucuucuauguaggcc

SEQ ID NO: 99628 - RNA, 22 nt, Artificial Sequence
  LRRK2 RNA guide
ucaauauaauugaagggucacc

SEQ ID NO: 99629 - RNA, 22 nt, Artificial Sequence
  LRRK2 RNA guide
ucacaauucuauuuucuaggug

SEQ ID NO: 99630 - RNA, 22 nt, Artificial Sequence
  LRRK2 RNA guide
ucacacacauuaccucguuuaa

SEQ ID NO: 99631 - RNA, 22 nt, Artificial Sequence
  LRRK2 RNA guide
ucacauaauuaagaauugcagc

SEQ ID NO: 99632 - RNA, 22 nt, Artificial Sequence
  LRRK2 RNA guide
ucagacucacauaauuaagaau

SEQ ID NO: 99633 - RNA, 22 nt, Artificial Sequence
  LRRK2 RNA guide
ucaguauauccauccaucuaag

SEQ ID NO: 99634 - RNA, 22 nt, Artificial Sequence
  LRRK2 RNA guide
ucaguauuuauacauuacccuu

SEQ ID NO: 99635 - RNA, 22 nt, Artificial Sequence
  LRRK2 RNA guide
ucaguuccaagguauuuguguc

SEQ ID NO: 99636 - RNA, 22 nt, Artificial Sequence
  LRRK2 RNA guide
ucauaguuuaagacacaaauac

SEQ ID NO: 99637 - RNA, 22 nt, Artificial Sequence
  LRRK2 RNA guide
uccaaagaacuuuucacacaca

SEQ ID NO: 99638 - RNA, 22 nt, Artificial Sequence
  LRRK2 RNA guide
uccaagguauuugugucuuaaa

SEQ ID NO: 99639 - RNA, 22 nt, Artificial Sequence
  LRRK2 RNA guide
uccacuccuugcugcaauucuu

SEQ ID NO: 99640 - RNA, 22 nt, Artificial Sequence
  LRRK2 RNA guide
uccauccaucuaaguguccauc

SEQ ID NO: 99641 - RNA, 22 nt, Artificial Sequence
  LRRK2 RNA guide
uccaucuaaguguccaucuaaa

SEQ ID NO: 99642 - RNA, 22 nt, Artificial Sequence
  LRRK2 RNA guide
ucccaaaguuacaauguuaaac

SEQ ID NO: 99643 - RNA, 22 nt, Artificial Sequence
  LRRK2 RNA guide
uccuugcugcaauucuuaauua

SEQ ID NO: 99644 - RNA, 22 nt, Artificial Sequence
  LRRK2 RNA guide
ucguuuaacauuguaacuuugg

SEQ ID NO: 99645 - RNA, 22 nt, Artificial Sequence
  LRRK2 RNA guide
ucuaggugacccuucaauuaua

SEQ ID NO: 99646 - RNA, 22 nt, Artificial Sequence
  LRRK2 RNA guide
ucuauuuucuaggugacccuuc

SEQ ID NO: 99647 - RNA, 22 nt, Artificial Sequence
  LRRK2 RNA guide
ucucagacucacauaauuaaga

SEQ ID NO: 99648 - RNA, 22 nt, Artificial Sequence
  LRRK2 RNA guide
ucugagaaaacagcuuaaccuu

SEQ ID NO: 99649 - RNA, 22 nt, Artificial Sequence
  LRRK2 RNA guide
ucugugauccacuccuugcugc

SEQ ID NO: 99650 - RNA, 22 nt, Artificial Sequence
  LRRK2 RNA guide
ugaaaaguucuuuggauauggu

SEQ ID NO: 99651 - RNA, 22 nt, Artificial Sequence
  LRRK2 RNA guide
ugaagggucaccuagaaaauag

SEQ ID NO: 99652 - RNA, 22 nt, Artificial Sequence
  LRRK2 RNA guide
ugaauucaguuccaagguauuu

SEQ ID NO: 99653 - RNA, 22 nt, Artificial Sequence
  LRRK2 RNA guide
ugacauaguaucaguauaucca

SEQ ID NO: 99654 - RNA, 22 nt, Artificial Sequence
  LRRK2 RNA guide
ugagccuauuuuauagaaaggu

SEQ ID NO: 99655 - RNA, 22 nt, Artificial Sequence
  LRRK2 RNA guide
ugaguauuuagauggacacuua

SEQ ID NO: 99656 - RNA, 22 nt, Artificial Sequence
  LRRK2 RNA guide
ugagucugagaaaacagcuuaa

SEQ ID NO: 99657 - RNA, 22 nt, Artificial Sequence
  LRRK2 RNA guide
ugauccacuccuugcugcaauu

SEQ ID NO: 99658 - RNA, 22 nt, Artificial Sequence
  LRRK2 RNA guide
ugcaauucuuaauuaugugagu

SEQ ID NO: 99659 - RNA, 22 nt, Artificial Sequence
  LRRK2 RNA guide
ugcagcaaggaguggaucacag

SEQ ID NO: 99660 - RNA, 22 nt, Artificial Sequence
  LRRK2 RNA guide
ugcaucaaaagucuucuaugua

SEQ ID NO: 99661 - RNA, 22 nt, Artificial Sequence
  LRRK2 RNA guide
ugcugcaauucuuaauuaugug

SEQ ID NO: 99662 - RNA, 22 nt, Artificial Sequence
  LRRK2 RNA guide
uggacacuuagauggauggaua

SEQ ID NO: 99663 - RNA, 22 nt, Artificial Sequence
  LRRK2 RNA guide
uggauaugguaagguacaaaua

SEQ ID NO: 99664 - RNA, 22 nt, Artificial Sequence
  LRRK2 RNA guide
uggauggauauacugauacuau

SEQ ID NO: 99665 - RNA, 22 nt, Artificial Sequence
  LRRK2 RNA guide
ugggaaggguaauguauaaaua

SEQ ID NO: 99666 - RNA, 22 nt, Artificial Sequence
  LRRK2 RNA guide
uguaacuuugggaaggguaaug

SEQ ID NO: 99667 - RNA, 22 nt, Artificial Sequence
  LRRK2 RNA guide
uguaccuuaccauauccaaaga

SEQ ID NO: 99668 - RNA, 22 nt, Artificial Sequence
  LRRK2 RNA guide
ugugaaaaguucuuuggauaug

SEQ ID NO: 99669 - RNA, 22 nt, Artificial Sequence
  LRRK2 RNA guide
ugugaauucaguuccaagguau

SEQ ID NO: 99670 - RNA, 22 nt, Artificial Sequence
  LRRK2 RNA guide
ugugagucugagaaaacagcuu

SEQ ID NO: 99671 - RNA, 22 nt, Artificial Sequence
  LRRK2 RNA guide
ugugauccacuccuugcugcaa

SEQ ID NO: 99672 - RNA, 22 nt, Artificial Sequence
  LRRK2 RNA guide
ugugugaaaaguucuuuggaua

SEQ ID NO: 99673 - RNA, 22 nt, Artificial Sequence
  LRRK2 RNA guide
ugugugugaaaaguucuuugga

SEQ ID NO: 99674 - RNA, 22 nt, Artificial Sequence
  LRRK2 RNA guide
uguuaaacgagguaaugugugu

SEQ ID NO: 99675 - RNA, 22 nt, Artificial Sequence
  LRRK2 RNA guide
uuaaacgagguaauguguguga

SEQ ID NO: 99676 - RNA, 22 nt, Artificial Sequence
  LRRK2 RNA guide
uuaacauuguaacuuugggaag

SEQ ID NO: 99677 - RNA, 22 nt, Artificial Sequence
  LRRK2 RNA guide
uuaagaauugcagcaaggagug

SEQ ID NO: 99678 - RNA, 22 nt, Artificial Sequence
  LRRK2 RNA guide
uuaagacacaaauaccuuggaa

SEQ ID NO: 99679 - RNA, 22 nt, Artificial Sequence
  LRRK2 RNA guide
uuaagcuguuuucucagacuca

SEQ ID NO: 99680 - RNA, 22 nt, Artificial Sequence
  LRRK2 RNA guide
uuaauuaugugagucugagaaa

SEQ ID NO: 99681 - RNA, 22 nt, Artificial Sequence
  LRRK2 RNA guide
uuacaauguuaaacgagguaau

SEQ ID NO: 99682 - RNA, 22 nt, Artificial Sequence
  LRRK2 RNA guide
uuaccauauccaaagaacuuuu

SEQ ID NO: 99683 - RNA, 22 nt, Artificial Sequence
  LRRK2 RNA guide
uuacccuucccaaaguuacaau

SEQ ID NO: 99684 - RNA, 22 nt, Artificial Sequence
  LRRK2 RNA guide
uuaccucguuuaacauuguaac

SEQ ID NO: 99685 - RNA, 22 nt, Artificial Sequence
  LRRK2 RNA guide
uuagauggacacuuagauggau

SEQ ID NO: 99686 - RNA, 22 nt, Artificial Sequence
  LRRK2 RNA guide
uuauacauuacccuucccaaag

SEQ ID NO: 99687 - RNA, 22 nt, Artificial Sequence
  LRRK2 RNA guide
uuaugugagucugagaaaacag

SEQ ID NO: 99688 - RNA, 22 nt, Artificial Sequence
  LRRK2 RNA guide
uucaauauaauugaagggucac

SEQ ID NO: 99689 - RNA, 22 nt, Artificial Sequence
  LRRK2 RNA guide
uucacaauucuauuuucuaggu

SEQ ID NO: 99690 - RNA, 22 nt, Artificial Sequence
  LRRK2 RNA guide
uucacacacauuaccucguuua

SEQ ID NO: 99691 - RNA, 22 nt, Artificial Sequence
  LRRK2 RNA guide
uucaguuccaagguauuugugu

SEQ ID NO: 99692 - RNA, 22 nt, Artificial Sequence
  LRRK2 RNA guide
uucccaaaguuacaauguuaaa

SEQ ID NO: 99693 - RNA, 22 nt, Artificial Sequence
  LRRK2 RNA guide
uucuaggugacccuucaauuau

SEQ ID NO: 99694 - RNA, 22 nt, Artificial Sequence
  LRRK2 RNA guide
uucuauuuucuaggugacccuu

SEQ ID NO: 99695 - RNA, 22 nt, Artificial Sequence
  LRRK2 RNA guide
uugaagggucaccuagaaaaua

SEQ ID NO: 99696 - RNA, 22 nt, Artificial Sequence
  LRRK2 RNA guide
uugacauaguaucaguauaucc

SEQ ID NO: 99697 - RNA, 22 nt, Artificial Sequence
  LRRK2 RNA guide
uugcagcaaggaguggaucaca

SEQ ID NO: 99698 - RNA, 22 nt, Artificial Sequence
  LRRK2 RNA guide
uugcaucaaaagucuucuaugu

SEQ ID NO: 99699 - RNA, 22 nt, Artificial Sequence
  LRRK2 RNA guide
uugcugcaauucuuaauuaugu

SEQ ID NO: 99700 - RNA, 22 nt, Artificial Sequence
  LRRK2 RNA guide
uuggauaugguaagguacaaau

SEQ ID NO: 99701 - RNA, 22 nt, Artificial Sequence
  LRRK2 RNA guide
uugggaaggguaauguauaaau

SEQ ID NO: 99702 - RNA, 22 nt, Artificial Sequence
  LRRK2 RNA guide
uuguaacuuugggaaggguaau

SEQ ID NO: 99703 - RNA, 22 nt, Artificial Sequence
  LRRK2 RNA guide
uuguaccuuaccauauccaaag

SEQ ID NO: 99704 - RNA, 22 nt, Artificial Sequence
  LRRK2 RNA guide
uugugaauucaguuccaaggua

SEQ ID NO: 99705 - RNA, 22 nt, Artificial Sequence
  LRRK2 RNA guide
uuuaacauuguaacuuugggaa

SEQ ID NO: 99706 - RNA, 22 nt, Artificial Sequence
  LRRK2 RNA guide
uuuaagacacaaauaccuugga

SEQ ID NO: 99707 - RNA, 22 nt, Artificial Sequence
  LRRK2 RNA guide
uuuagauggacacuuagaugga

SEQ ID NO: 99708 - RNA, 22 nt, Artificial Sequence
  LRRK2 RNA guide
uuuauacauuacccuucccaaa

SEQ ID NO: 99709 - RNA, 22 nt, Artificial Sequence
  LRRK2 RNA guide
uuucacacacauuaccucguuu

SEQ ID NO: 99710 - RNA, 22 nt, Artificial Sequence
  LRRK2 RNA guide
uuucuaggugacccuucaauua

SEQ ID NO: 99711 - RNA, 22 nt, Artificial Sequence
  LRRK2 RNA guide
uuugacauaguaucaguauauc

SEQ ID NO: 99712 - RNA, 22 nt, Artificial Sequence
  LRRK2 RNA guide
uuugcaucaaaagucuucuaug

SEQ ID NO: 99713 - RNA, 22 nt, Artificial Sequence
  LRRK2 RNA guide
uuugggaaggguaauguauaaa

SEQ ID NO: 99714 - RNA, 22 nt, Artificial Sequence
  LRRK2 RNA guide
uuuguaccuuaccauauccaaa

SEQ ID NO: 99715 - RNA, 22 nt, Artificial Sequence
  LRRK2 RNA guide
uuuucacacacauuaccucguu

SEQ ID NO: 99716 - RNA, 20 nt, Artificial Sequence
  LRRK2 RNA guide
aaacagggcaaugaugugaa

SEQ ID NO: 99717 - RNA, 20 nt, Artificial Sequence
  LRRK2 RNA guide
aacagggcaaugaugugaau

SEQ ID NO: 99718 - RNA, 20 nt, Artificial Sequence
  LRRK2 RNA guide
aacauuuagaaggauacugu

SEQ ID NO: 99719 - RNA, 20 nt, Artificial Sequence
  LRRK2 RNA guide
aaggauacuguuuuccaaac

SEQ ID NO: 99720 - RNA, 20 nt, Artificial Sequence
  LRRK2 RNA guide
aagguugagcuagugauuga

SEQ ID NO: 99721 - RNA, 20 nt, Artificial Sequence
  LRRK2 RNA guide
aaguagaggugucaaucacu

SEQ ID NO: 99722 - RNA, 20 nt, Artificial Sequence
  LRRK2 RNA guide
aagucaacuaaaaauacaug

SEQ ID NO: 99723 - RNA, 20 nt, Artificial Sequence
  LRRK2 RNA guide
aaucacuagcucaaccuuaa

SEQ ID NO: 99724 - RNA, 20 nt, Artificial Sequence
  LRRK2 RNA guide
acaccucuacuucagcugaa

SEQ ID NO: 99725 - RNA, 20 nt, Artificial Sequence
  LRRK2 RNA guide
acagggcaaugaugugaaug

SEQ ID NO: 99726 - RNA, 20 nt, Artificial Sequence
  LRRK2 RNA guide
acauuuagaaggauacuguu

SEQ ID NO: 99727 - RNA, 20 nt, Artificial Sequence
  LRRK2 RNA guide
acauuucguuuaagguugag

SEQ ID NO: 99728 - RNA, 20 nt, Artificial Sequence
  LRRK2 RNA guide
accaucauucacaucauugc

SEQ ID NO: 99729 - RNA, 20 nt, Artificial Sequence
  LRRK2 RNA guide
accucuacuucagcugaaaa

SEQ ID NO: 99730 - RNA, 20 nt, Artificial Sequence
  LRRK2 RNA guide
acuaaaaauacaugagccaa

SEQ ID NO: 99731 - RNA, 20 nt, Artificial Sequence
  LRRK2 RNA guide
acuagcucaaccuuaaacga

SEQ ID NO: 99732 - RNA, 20 nt, Artificial Sequence
  LRRK2 RNA guide
acuguuuuccaaacagggca

SEQ ID NO: 99733 - RNA, 20 nt, Artificial Sequence
  LRRK2 RNA guide
agaaggauacuguuuuccaa

SEQ ID NO: 99734 - RNA, 20 nt, Artificial Sequence
  LRRK2 RNA guide
agaggugucaaucacuagcu

SEQ ID NO: 99735 - RNA, 20 nt, Artificial Sequence
  LRRK2 RNA guide
agcuagugauugacaccucu

SEQ ID NO: 99736 - RNA, 20 nt, Artificial Sequence
  LRRK2 RNA guide
agcucaaccuuaaacgaaau

SEQ ID NO: 99737 - RNA, 20 nt, Artificial Sequence
  LRRK2 RNA guide
agcugaaguagaggugucaa

SEQ ID NO: 99738 - RNA, 20 nt, Artificial Sequence
  LRRK2 RNA guide
aggauacuguuuuccaaaca

SEQ ID NO: 99739 - RNA, 20 nt, Artificial Sequence
  LRRK2 RNA guide
agggcaaugaugugaaugau

SEQ ID NO: 99740 - RNA, 20 nt, Artificial Sequence
  LRRK2 RNA guide
aggugucaaucacuagcuca

SEQ ID NO: 99741 - RNA, 20 nt, Artificial Sequence
  LRRK2 RNA guide
agguugagcuagugauugac

SEQ ID NO: 99742 - RNA, 20 nt, Artificial Sequence
  LRRK2 RNA guide
aguagaggugucaaucacua

SEQ ID NO: 99743 - RNA, 20 nt, Artificial Sequence
  LRRK2 RNA guide
agucaacuaaaaauacauga

SEQ ID NO: 99744 - RNA, 20 nt, Artificial Sequence
  LRRK2 RNA guide
agugauugacaccucuacuu

SEQ ID NO: 99745 - RNA, 20 nt, Artificial Sequence
  LRRK2 RNA guide
auacuguuuuccaaacaggg

SEQ ID NO: 99746 - RNA, 20 nt, Artificial Sequence
  LRRK2 RNA guide
auauuuucagcugaaguaga

SEQ ID NO: 99747 - RNA, 20 nt, Artificial Sequence
  LRRK2 RNA guide
aucacuagcucaaccuuaaa

SEQ ID NO: 99748 - RNA, 20 nt, Artificial Sequence
  LRRK2 RNA guide
aucauucacaucauugcccu

SEQ ID NO: 99749 - RNA, 20 nt, Artificial Sequence
  LRRK2 RNA guide
aucauugcccuguuuggaaa

SEQ ID NO: 99750 - RNA, 20 nt, Artificial Sequence
  LRRK2 RNA guide
auguuaccaucauucacauc

SEQ ID NO: 99751 - RNA, 20 nt, Artificial Sequence
  LRRK2 RNA guide
auucacaucauugcccuguu

SEQ ID NO: 99752 - RNA, 20 nt, Artificial Sequence
  LRRK2 RNA guide
auucacauuucguuuaaggu

SEQ ID NO: 99753 - RNA, 20 nt, Artificial Sequence
  LRRK2 RNA guide
auugacaccucuacuucagc

SEQ ID NO: 99754 - RNA, 20 nt, Artificial Sequence
  LRRK2 RNA guide
auugcccuguuuggaaaaca

SEQ ID NO: 99755 - RNA, 20 nt, Artificial Sequence
  LRRK2 RNA guide
auuucguuuaagguugagcu

SEQ ID NO: 99756 - RNA, 20 nt, Artificial Sequence
  LRRK2 RNA guide
auuuucagcugaaguagagg

SEQ ID NO: 99757 - RNA, 20 nt, Artificial Sequence
  LRRK2 RNA guide
caaacagggcaaugauguga

SEQ ID NO: 99758 - RNA, 20 nt, Artificial Sequence
  LRRK2 RNA guide
caaucacuagcucaaccuua

SEQ ID NO: 99759 - RNA, 20 nt, Artificial Sequence
  LRRK2 RNA guide
caaugaugugaaugauggua

SEQ ID NO: 99760 - RNA, 20 nt, Artificial Sequence
  LRRK2 RNA guide
cacauaauauguuaccauca

SEQ ID NO: 99761 - RNA, 20 nt, Artificial Sequence
  LRRK2 RNA guide
cacaucauugcccuguuugg

SEQ ID NO: 99762 - RNA, 20 nt, Artificial Sequence
  LRRK2 RNA guide
cacauuucguuuaagguuga

SEQ ID NO: 99763 - RNA, 20 nt, Artificial Sequence
  LRRK2 RNA guide
caccucuacuucagcugaaa

SEQ ID NO: 99764 - RNA, 20 nt, Artificial Sequence
  LRRK2 RNA guide
cacuagcucaaccuuaaacg

SEQ ID NO: 99765 - RNA, 20 nt, Artificial Sequence
  LRRK2 RNA guide
cagcugaaguagagguguca

SEQ ID NO: 99766 - RNA, 20 nt, Artificial Sequence
  LRRK2 RNA guide
cagggcaaugaugugaauga

SEQ ID NO: 99767 - RNA, 20 nt, Artificial Sequence
  LRRK2 RNA guide
caucauucacaucauugccc

SEQ ID NO: 99768 - RNA, 20 nt, Artificial Sequence
  LRRK2 RNA guide
caucauugcccuguuuggaa

SEQ ID NO: 99769 - RNA, 20 nt, Artificial Sequence
  LRRK2 RNA guide
cauucacaucauugcccugu

SEQ ID NO: 99770 - RNA, 20 nt, Artificial Sequence
  LRRK2 RNA guide
cauugcccuguuuggaaaac

SEQ ID NO: 99771 - RNA, 20 nt, Artificial Sequence
  LRRK2 RNA guide
cauuuagaaggauacuguuu

SEQ ID NO: 99772 - RNA, 20 nt, Artificial Sequence
  LRRK2 RNA guide
cauuucguuuaagguugagc

SEQ ID NO: 99773 - RNA, 20 nt, Artificial Sequence
  LRRK2 RNA guide
ccaaacagggcaaugaugug

SEQ ID NO: 99774 - RNA, 20 nt, Artificial Sequence
  LRRK2 RNA guide
ccaucauucacaucauugcc

SEQ ID NO: 99775 - RNA, 20 nt, Artificial Sequence
  LRRK2 RNA guide
cccuguuuggaaaacaguau

SEQ ID NO: 99776 - RNA, 20 nt, Artificial Sequence
  LRRK2 RNA guide
ccucuacuucagcugaaaau

SEQ ID NO: 99777 - RNA, 20 nt, Artificial Sequence
  LRRK2 RNA guide
ccuguuuggaaaacaguauc

SEQ ID NO: 99778 - RNA, 20 nt, Artificial Sequence
  LRRK2 RNA guide
cguuuaagguugagcuagug

SEQ ID NO: 99779 - RNA, 20 nt, Artificial Sequence
  LRRK2 RNA guide
cuaaaaauacaugagccaaa

SEQ ID NO: 99780 - RNA, 20 nt, Artificial Sequence
  LRRK2 RNA guide
cuaagucaacuaaaaauaca

SEQ ID NO: 99781 - RNA, 20 nt, Artificial Sequence
  LRRK2 RNA guide
cuagcucaaccuuaaacgaa

SEQ ID NO: 99782 - RNA, 20 nt, Artificial Sequence
  LRRK2 RNA guide
cuagugauugacaccucuac

SEQ ID NO: 99783 - RNA, 20 nt, Artificial Sequence
  LRRK2 RNA guide
cucaaccuuaaacgaaaugu

SEQ ID NO: 99784 - RNA, 20 nt, Artificial Sequence
  LRRK2 RNA guide
cugaaguagaggugucaauc

SEQ ID NO: 99785 - RNA, 20 nt, Artificial Sequence
  LRRK2 RNA guide
cuguuuggaaaacaguaucc

SEQ ID NO: 99786 - RNA, 20 nt, Artificial Sequence
  LRRK2 RNA guide
cuguuuuccaaacagggcaa

SEQ ID NO: 99787 - RNA, 20 nt, Artificial Sequence
  LRRK2 RNA guide
gaaaucauguuucaaagauc

SEQ ID NO: 99788 - RNA, 20 nt, Artificial Sequence
  LRRK2 RNA guide
gaaggauacuguuuuccaaa

SEQ ID NO: 99789 - RNA, 20 nt, Artificial Sequence
  LRRK2 RNA guide
gaaguagaggugucaaucac

SEQ ID NO: 99790 - RNA, 20 nt, Artificial Sequence
  LRRK2 RNA guide
gacaccucuacuucagcuga

SEQ ID NO: 99791 - RNA, 20 nt, Artificial Sequence
  LRRK2 RNA guide
gagcuagugauugacaccuc

SEQ ID NO: 99792 - RNA, 20 nt, Artificial Sequence
  LRRK2 RNA guide
gaggugucaaucacuagcuc

SEQ ID NO: 99793 - RNA, 20 nt, Artificial Sequence
  LRRK2 RNA guide
gauacuguuuuccaaacagg

SEQ ID NO: 99794 - RNA, 20 nt, Artificial Sequence
  LRRK2 RNA guide
gauggaucuuugaaacauga

SEQ ID NO: 99795 - RNA, 20 nt, Artificial Sequence
  LRRK2 RNA guide
gauugacaccucuacuucag

SEQ ID NO: 99796 - RNA, 20 nt, Artificial Sequence
  LRRK2 RNA guide
gcaaugaugugaaugauggu

SEQ ID NO: 99797 - RNA, 20 nt, Artificial Sequence
  LRRK2 RNA guide
gcccuguuuggaaaacagua

SEQ ID NO: 99798 - RNA, 20 nt, Artificial Sequence
  LRRK2 RNA guide
gcuagugauugacaccucua

SEQ ID NO: 99799 - RNA, 20 nt, Artificial Sequence
  LRRK2 RNA guide
gcucaaccuuaaacgaaaug

SEQ ID NO: 99800 - RNA, 20 nt, Artificial Sequence
  LRRK2 RNA guide
gcugaaguagaggugucaau

SEQ ID NO: 99801 - RNA, 20 nt, Artificial Sequence
  LRRK2 RNA guide
ggaaaacaguauccuucuaa

SEQ ID NO: 99802 - RNA, 20 nt, Artificial Sequence
  LRRK2 RNA guide
ggauacuguuuuccaaacag

SEQ ID NO: 99803 - RNA, 20 nt, Artificial Sequence
  LRRK2 RNA guide
ggcaaugaugugaaugaugg

SEQ ID NO: 99804 - RNA, 20 nt, Artificial Sequence
  LRRK2 RNA guide
gggcaaugaugugaaugaug

SEQ ID NO: 99805 - RNA, 20 nt, Artificial Sequence
  LRRK2 RNA guide
ggugucaaucacuagcucaa

SEQ ID NO: 99806 - RNA, 20 nt, Artificial Sequence
  LRRK2 RNA guide
gguugagcuagugauugaca

SEQ ID NO: 99807 - RNA, 20 nt, Artificial Sequence
  LRRK2 RNA guide
guagaggugucaaucacuag

SEQ ID NO: 99808 - RNA, 20 nt, Artificial Sequence
  LRRK2 RNA guide
gucaaucacuagcucaaccu

SEQ ID NO: 99809 - RNA, 20 nt, Artificial Sequence
  LRRK2 RNA guide
gugaaugaugguaacauauu

SEQ ID NO: 99810 - RNA, 20 nt, Artificial Sequence
  LRRK2 RNA guide
gugauugacaccucuacuuc

SEQ ID NO: 99811 - RNA, 20 nt, Artificial Sequence
  LRRK2 RNA guide
gugucaaucacuagcucaac

SEQ ID NO: 99812 - RNA, 20 nt, Artificial Sequence
  LRRK2 RNA guide
guuaccaucauucacaucau

SEQ ID NO: 99813 - RNA, 20 nt, Artificial Sequence
  LRRK2 RNA guide
guugagcuagugauugacac

SEQ ID NO: 99814 - RNA, 20 nt, Artificial Sequence
  LRRK2 RNA guide
guuuaagguugagcuaguga

SEQ ID NO: 99815 - RNA, 20 nt, Artificial Sequence
  LRRK2 RNA guide
guuuggaaaacaguauccuu

SEQ ID NO: 99816 - RNA, 20 nt, Artificial Sequence
  LRRK2 RNA guide
guuuuccaaacagggcaaug

SEQ ID NO: 99817 - RNA, 20 nt, Artificial Sequence
  LRRK2 RNA guide
uaagguugagcuagugauug

SEQ ID NO: 99818 - RNA, 20 nt, Artificial Sequence
  LRRK2 RNA guide
uaagucaacuaaaaauacau

SEQ ID NO: 99819 - RNA, 20 nt, Artificial Sequence
  LRRK2 RNA guide
uaccaucauucacaucauug

SEQ ID NO: 99820 - RNA, 20 nt, Artificial Sequence
  LRRK2 RNA guide
uacuguuuuccaaacagggc

SEQ ID NO: 99821 - RNA, 20 nt, Artificial Sequence
  LRRK2 RNA guide
uagaaggauacuguuuucca

SEQ ID NO: 99822 - RNA, 20 nt, Artificial Sequence
  LRRK2 RNA guide
uagaggugucaaucacuagc

SEQ ID NO: 99823 - RNA, 20 nt, Artificial Sequence
  LRRK2 RNA guide
uagcucaaccuuaaacgaaa

SEQ ID NO: 99824 - RNA, 20 nt, Artificial Sequence
  LRRK2 RNA guide
uagugauugacaccucuacu

SEQ ID NO: 99825 - RNA, 20 nt, Artificial Sequence
  LRRK2 RNA guide
uauauuuucagcugaaguag

SEQ ID NO: 99826 - RNA, 20 nt, Artificial Sequence
  LRRK2 RNA guide
uauguuaccaucauucacau

SEQ ID NO: 99827 - RNA, 20 nt, Artificial Sequence
  LRRK2 RNA guide
uauucacauuucguuuaagg

SEQ ID NO: 99828 - RNA, 20 nt, Artificial Sequence
  LRRK2 RNA guide
uauuuucagcugaaguagag

SEQ ID NO: 99829 - RNA, 20 nt, Artificial Sequence
  LRRK2 RNA guide
ucaaucacuagcucaaccuu

SEQ ID NO: 99830 - RNA, 20 nt, Artificial Sequence
  LRRK2 RNA guide
ucacaucauugcccuguuug

SEQ ID NO: 99831 - RNA, 20 nt, Artificial Sequence
  LRRK2 RNA guide
ucacauuucguuuaagguug

SEQ ID NO: 99832 - RNA, 20 nt, Artificial Sequence
  LRRK2 RNA guide
ucacuagcucaaccuuaaac

SEQ ID NO: 99833 - RNA, 20 nt, Artificial Sequence
  LRRK2 RNA guide
ucagcugaaguagagguguc

SEQ ID NO: 99834 - RNA, 20 nt, Artificial Sequence
  LRRK2 RNA guide
ucauucacaucauugcccug

SEQ ID NO: 99835 - RNA, 20 nt, Artificial Sequence
  LRRK2 RNA guide
ucauugcccuguuuggaaaa

SEQ ID NO: 99836 - RNA, 20 nt, Artificial Sequence
  LRRK2 RNA guide
uccaaacagggcaaugaugu

SEQ ID NO: 99837 - RNA, 20 nt, Artificial Sequence
  LRRK2 RNA guide
ucguuuaagguugagcuagu

SEQ ID NO: 99838 - RNA, 20 nt, Artificial Sequence
  LRRK2 RNA guide
ugaaaucauguuucaaagau

SEQ ID NO: 99839 - RNA, 20 nt, Artificial Sequence
  LRRK2 RNA guide
ugaaguagaggugucaauca

SEQ ID NO: 99840 - RNA, 20 nt, Artificial Sequence
  LRRK2 RNA guide
ugacaccucuacuucagcug

SEQ ID NO: 99841 - RNA, 20 nt, Artificial Sequence
  LRRK2 RNA guide
ugagcuagugauugacaccu

SEQ ID NO: 99842 - RNA, 20 nt, Artificial Sequence
  LRRK2 RNA guide
ugauggaucuuugaaacaug

SEQ ID NO: 99843 - RNA, 20 nt, Artificial Sequence
  LRRK2 RNA guide
ugauugacaccucuacuuca

SEQ ID NO: 99844 - RNA, 20 nt, Artificial Sequence
  LRRK2 RNA guide
ugcccuguuuggaaaacagu

SEQ ID NO: 99845 - RNA, 20 nt, Artificial Sequence
  LRRK2 RNA guide
uggaaaacaguauccuucua

SEQ ID NO: 99846 - RNA, 20 nt, Artificial Sequence
  LRRK2 RNA guide
ugucaaucacuagcucaacc

SEQ ID NO: 99847 - RNA, 20 nt, Artificial Sequence
  LRRK2 RNA guide
uguuaccaucauucacauca

SEQ ID NO: 99848 - RNA, 20 nt, Artificial Sequence
  LRRK2 RNA guide
uguuuggaaaacaguauccu

SEQ ID NO: 99849 - RNA, 20 nt, Artificial Sequence
  LRRK2 RNA guide
uguuuuccaaacagggcaau

SEQ ID NO: 99850 - RNA, 20 nt, Artificial Sequence
  LRRK2 RNA guide
uuaagguugagcuagugauu

SEQ ID NO: 99851 - RNA, 20 nt, Artificial Sequence
  LRRK2 RNA guide
uuaccaucauucacaucauu

SEQ ID NO: 99852 - RNA, 20 nt, Artificial Sequence
  LRRK2 RNA guide
uuagaaggauacuguuuucc

SEQ ID NO: 99853 - RNA, 20 nt, Artificial Sequence
  LRRK2 RNA guide
uuauauuuucagcugaagua

SEQ ID NO: 99854 - RNA, 20 nt, Artificial Sequence
  LRRK2 RNA guide
uucacaucauugcccuguuu

SEQ ID NO: 99855 - RNA, 20 nt, Artificial Sequence
  LRRK2 RNA guide
uucacauuucguuuaagguu

SEQ ID NO: 99856 - RNA, 20 nt, Artificial Sequence
  LRRK2 RNA guide
uucagcugaaguagaggugu

SEQ ID NO: 99857 - RNA, 20 nt, Artificial Sequence
  LRRK2 RNA guide
uucaguuuggcucauguauu

SEQ ID NO: 99858 - RNA, 20 nt, Artificial Sequence
  LRRK2 RNA guide
uuccaaacagggcaaugaug

SEQ ID NO: 99859 - RNA, 20 nt, Artificial Sequence
  LRRK2 RNA guide
uucguuuaagguugagcuag

SEQ ID NO: 99860 - RNA, 20 nt, Artificial Sequence
  LRRK2 RNA guide
uugacaccucuacuucagcu

SEQ ID NO: 99861 - RNA, 20 nt, Artificial Sequence
  LRRK2 RNA guide
uugagcuagugauugacacc

SEQ ID NO: 99862 - RNA, 20 nt, Artificial Sequence
  LRRK2 RNA guide
uugcccuguuuggaaaacag

SEQ ID NO: 99863 - RNA, 20 nt, Artificial Sequence
  LRRK2 RNA guide
uuggaaaacaguauccuucu

SEQ ID NO: 99864 - RNA, 20 nt, Artificial Sequence
  LRRK2 RNA guide
uuuaagguugagcuagugau

SEQ ID NO: 99865 - RNA, 20 nt, Artificial Sequence
  LRRK2 RNA guide
uuuagaaggauacuguuuuc

SEQ ID NO: 99866 - RNA, 20 nt, Artificial Sequence
  LRRK2 RNA guide
uuuauauuuucagcugaagu

SEQ ID NO: 99867 - RNA, 20 nt, Artificial Sequence
  LRRK2 RNA guide
uuucagcugaaguagaggug

SEQ ID NO: 99868 - RNA, 20 nt, Artificial Sequence
  LRRK2 RNA guide
uuuccaaacagggcaaugau

SEQ ID NO: 99869 - RNA, 20 nt, Artificial Sequence
  LRRK2 RNA guide
uuucguuuaagguugagcua

SEQ ID NO: 99870 - RNA, 20 nt, Artificial Sequence
  LRRK2 RNA guide
uuuucagcugaaguagaggu

SEQ ID NO: 99871 - RNA, 20 nt, Artificial Sequence
  LRRK2 RNA guide
uuuuccaaacagggcaauga

SEQ ID NO: 99872 - RNA, 21 nt, Artificial Sequence
  LRRK2 RNA guide
aaacagggcaaugaugugaau

SEQ ID NO: 99873 - RNA, 21 nt, Artificial Sequence
  LRRK2 RNA guide
aacagggcaaugaugugaaug

SEQ ID NO: 99874 - RNA, 21 nt, Artificial Sequence
  LRRK2 RNA guide
aacauuuagaaggauacuguu

SEQ ID NO: 99875 - RNA, 21 nt, Artificial Sequence
  LRRK2 RNA guide
aacuaaaaauacaugagccaa

SEQ ID NO: 99876 - RNA, 21 nt, Artificial Sequence
  LRRK2 RNA guide
aaggauacuguuuuccaaaca

SEQ ID NO: 99877 - RNA, 21 nt, Artificial Sequence
  LRRK2 RNA guide
aagguugagcuagugauugac

SEQ ID NO: 99878 - RNA, 21 nt, Artificial Sequence
  LRRK2 RNA guide
aaguagaggugucaaucacua

SEQ ID NO: 99879 - RNA, 21 nt, Artificial Sequence
  LRRK2 RNA guide
aagucaacuaaaaauacauga

SEQ ID NO: 99880 - RNA, 21 nt, Artificial Sequence
  LRRK2 RNA guide
aaucacuagcucaaccuuaaa

SEQ ID NO: 99881 - RNA, 21 nt, Artificial Sequence
  LRRK2 RNA guide
acacauaauauguuaccauca

SEQ ID NO: 99882 - RNA, 21 nt, Artificial Sequence
  LRRK2 RNA guide
acaccucuacuucagcugaaa

SEQ ID NO: 99883 - RNA, 21 nt, Artificial Sequence
  LRRK2 RNA guide
acagggcaaugaugugaauga

SEQ ID NO: 99884 - RNA, 21 nt, Artificial Sequence
  LRRK2 RNA guide
acaucauugcccuguuuggaa

SEQ ID NO: 99885 - RNA, 21 nt, Artificial Sequence
  LRRK2 RNA guide
acauuuagaaggauacuguuu

SEQ ID NO: 99886 - RNA, 21 nt, Artificial Sequence
  LRRK2 RNA guide
acauuucguuuaagguugagc

SEQ ID NO: 99887 - RNA, 21 nt, Artificial Sequence
  LRRK2 RNA guide
accaucauucacaucauugcc

SEQ ID NO: 99888 - RNA, 21 nt, Artificial Sequence
  LRRK2 RNA guide
accucuacuucagcugaaaau

SEQ ID NO: 99889 - RNA, 21 nt, Artificial Sequence
  LRRK2 RNA guide
acuaaaaauacaugagccaaa

SEQ ID NO: 99890 - RNA, 21 nt, Artificial Sequence
  LRRK2 RNA guide
acuagcucaaccuuaaacgaa

SEQ ID NO: 99891 - RNA, 21 nt, Artificial Sequence
  LRRK2 RNA guide
acuguuuuccaaacagggcaa

SEQ ID NO: 99892 - RNA, 21 nt, Artificial Sequence
  LRRK2 RNA guide
agaaggauacuguuuuccaaa

SEQ ID NO: 99893 - RNA, 21 nt, Artificial Sequence
  LRRK2 RNA guide
agaggugucaaucacuagcuc

SEQ ID NO: 99894 - RNA, 21 nt, Artificial Sequence
  LRRK2 RNA guide
agcuagugauugacaccucua

SEQ ID NO: 99895 - RNA, 21 nt, Artificial Sequence
  LRRK2 RNA guide
agcucaaccuuaaacgaaaug

SEQ ID NO: 99896 - RNA, 21 nt, Artificial Sequence
  LRRK2 RNA guide
agcugaaguagaggugucaau

SEQ ID NO: 99897 - RNA, 21 nt, Artificial Sequence
  LRRK2 RNA guide
aggauacuguuuuccaaacag

SEQ ID NO: 99898 - RNA, 21 nt, Artificial Sequence
  LRRK2 RNA guide
agggcaaugaugugaaugaug

SEQ ID NO: 99899 - RNA, 21 nt, Artificial Sequence
  LRRK2 RNA guide
aggugucaaucacuagcucaa

SEQ ID NO: 99900 - RNA, 21 nt, Artificial Sequence
  LRRK2 RNA guide
agguugagcuagugauugaca

SEQ ID NO: 99901 - RNA, 21 nt, Artificial Sequence
  LRRK2 RNA guide
aguagaggugucaaucacuag

SEQ ID NO: 99902 - RNA, 21 nt, Artificial Sequence
  LRRK2 RNA guide
agucaacuaaaaauacaugag

SEQ ID NO: 99903 - RNA, 21 nt, Artificial Sequence
  LRRK2 RNA guide
agugauugacaccucuacuuc

SEQ ID NO: 99904 - RNA, 21 nt, Artificial Sequence
  LRRK2 RNA guide
aguuuggcucauguauuuuua

SEQ ID NO: 99905 - RNA, 21 nt, Artificial Sequence
  LRRK2 RNA guide
auacuguuuuccaaacagggc

SEQ ID NO: 99906 - RNA, 21 nt, Artificial Sequence
  LRRK2 RNA guide
auauguuaccaucauucacau

SEQ ID NO: 99907 - RNA, 21 nt, Artificial Sequence
  LRRK2 RNA guide
auauucacauuucguuuaagg

SEQ ID NO: 99908 - RNA, 21 nt, Artificial Sequence
  LRRK2 RNA guide
auauuuucagcugaaguagag

SEQ ID NO: 99909 - RNA, 21 nt, Artificial Sequence
  LRRK2 RNA guide
aucacuagcucaaccuuaaac

SEQ ID NO: 99910 - RNA, 21 nt, Artificial Sequence
  LRRK2 RNA guide
aucauucacaucauugcccug

SEQ ID NO: 99911 - RNA, 21 nt, Artificial Sequence
  LRRK2 RNA guide
aucauugcccuguuuggaaaa

SEQ ID NO: 99912 - RNA, 21 nt, Artificial Sequence
  LRRK2 RNA guide
augaaaucauguuucaaagau

SEQ ID NO: 99913 - RNA, 21 nt, Artificial Sequence
  LRRK2 RNA guide
augauggaucuuugaaacaug

SEQ ID NO: 99914 - RNA, 21 nt, Artificial Sequence
  LRRK2 RNA guide
auguuaccaucauucacauca

SEQ ID NO: 99915 - RNA, 21 nt, Artificial Sequence
  LRRK2 RNA guide
auucacaucauugcccuguuu

SEQ ID NO: 99916 - RNA, 21 nt, Artificial Sequence
  LRRK2 RNA guide
auucacauuucguuuaagguu

SEQ ID NO: 99917 - RNA, 21 nt, Artificial Sequence
  LRRK2 RNA guide
auugacaccucuacuucagcu

SEQ ID NO: 99918 - RNA, 21 nt, Artificial Sequence
  LRRK2 RNA guide
auugcccuguuuggaaaacag

SEQ ID NO: 99919 - RNA, 21 nt, Artificial Sequence
  LRRK2 RNA guide
auuuagaaggauacuguuuuc

SEQ ID NO: 99920 - RNA, 21 nt, Artificial Sequence
  LRRK2 RNA guide
auuuauauuuucagcugaagu

SEQ ID NO: 99921 - RNA, 21 nt, Artificial Sequence
  LRRK2 RNA guide
auuucguuuaagguugagcua

SEQ ID NO: 99922 - RNA, 21 nt, Artificial Sequence
  LRRK2 RNA guide
auuuucagcugaaguagaggu

SEQ ID NO: 99923 - RNA, 21 nt, Artificial Sequence
  LRRK2 RNA guide
caaacagggcaaugaugugaa

SEQ ID NO: 99924 - RNA, 21 nt, Artificial Sequence
  LRRK2 RNA guide
caaucacuagcucaaccuuaa

SEQ ID NO: 99925 - RNA, 21 nt, Artificial Sequence
  LRRK2 RNA guide
caaugaugugaaugaugguaa

SEQ ID NO: 99926 - RNA, 21 nt, Artificial Sequence
  LRRK2 RNA guide
cacauaauauguuaccaucau

SEQ ID NO: 99927 - RNA, 21 nt, Artificial Sequence
  LRRK2 RNA guide
cacaucauugcccuguuugga

SEQ ID NO: 99928 - RNA, 21 nt, Artificial Sequence
  LRRK2 RNA guide
cacauuucguuuaagguugag

SEQ ID NO: 99929 - RNA, 21 nt, Artificial Sequence
  LRRK2 RNA guide
caccucuacuucagcugaaaa

SEQ ID NO: 99930 - RNA, 21 nt, Artificial Sequence
  LRRK2 RNA guide
cacuagcucaaccuuaaacga

SEQ ID NO: 99931 - RNA, 21 nt, Artificial Sequence
  LRRK2 RNA guide
cagcugaaguagaggugucaa

SEQ ID NO: 99932 - RNA, 21 nt, Artificial Sequence
  LRRK2 RNA guide
cagggcaaugaugugaaugau

SEQ ID NO: 99933 - RNA, 21 nt, Artificial Sequence
  LRRK2 RNA guide
cauaauauguuaccaucauuc

SEQ ID NO: 99934 - RNA, 21 nt, Artificial Sequence
  LRRK2 RNA guide
caucauucacaucauugcccu

SEQ ID NO: 99935 - RNA, 21 nt, Artificial Sequence
  LRRK2 RNA guide
caucauugcccuguuuggaaa

SEQ ID NO: 99936 - RNA, 21 nt, Artificial Sequence
  LRRK2 RNA guide
caugagccaaacugaaauaaa

SEQ ID NO: 99937 - RNA, 21 nt, Artificial Sequence
  LRRK2 RNA guide
cauguuucaaagauccaucau

SEQ ID NO: 99938 - RNA, 21 nt, Artificial Sequence
  LRRK2 RNA guide
cauucacaucauugcccuguu

SEQ ID NO: 99939 - RNA, 21 nt, Artificial Sequence
  LRRK2 RNA guide
cauugcccuguuuggaaaaca

SEQ ID NO: 99940 - RNA, 21 nt, Artificial Sequence
  LRRK2 RNA guide
cauuuagaaggauacuguuuu

SEQ ID NO: 99941 - RNA, 21 nt, Artificial Sequence
  LRRK2 RNA guide
cauuucguuuaagguugagcu

SEQ ID NO: 99942 - RNA, 21 nt, Artificial Sequence
  LRRK2 RNA guide
ccaaacagggcaaugauguga

SEQ ID NO: 99943 - RNA, 21 nt, Artificial Sequence
  LRRK2 RNA guide
ccaucauucacaucauugccc

SEQ ID NO: 99944 - RNA, 21 nt, Artificial Sequence
  LRRK2 RNA guide
cccuguuuggaaaacaguauc

SEQ ID NO: 99945 - RNA, 21 nt, Artificial Sequence
  LRRK2 RNA guide
ccucuacuucagcugaaaaua

SEQ ID NO: 99946 - RNA, 21 nt, Artificial Sequence
  LRRK2 RNA guide
ccuguuuggaaaacaguaucc

SEQ ID NO: 99947 - RNA, 21 nt, Artificial Sequence
  LRRK2 RNA guide
cguuuaagguugagcuaguga

SEQ ID NO: 99948 - RNA, 21 nt, Artificial Sequence
  LRRK2 RNA guide
cuaaaaauacaugagccaaac

SEQ ID NO: 99949 - RNA, 21 nt, Artificial Sequence
  LRRK2 RNA guide
cuaagucaacuaaaaauacau

SEQ ID NO: 99950 - RNA, 21 nt, Artificial Sequence
  LRRK2 RNA guide
cuaaguucuuuacacuauaaa

SEQ ID NO: 99951 - RNA, 21 nt, Artificial Sequence
  LRRK2 RNA guide
cuagcucaaccuuaaacgaaa

SEQ ID NO: 99952 - RNA, 21 nt, Artificial Sequence
  LRRK2 RNA guide
cuagugauugacaccucuacu

SEQ ID NO: 99953 - RNA, 21 nt, Artificial Sequence
  LRRK2 RNA guide
cucaaccuuaaacgaaaugug

SEQ ID NO: 99954 - RNA, 21 nt, Artificial Sequence
  LRRK2 RNA guide
cugaaguagaggugucaauca

SEQ ID NO: 99955 - RNA, 21 nt, Artificial Sequence
  LRRK2 RNA guide
cuguuuggaaaacaguauccu

SEQ ID NO: 99956 - RNA, 21 nt, Artificial Sequence
  LRRK2 RNA guide
cuguuuuccaaacagggcaau

SEQ ID NO: 99957 - RNA, 21 nt, Artificial Sequence
  LRRK2 RNA guide
cuuauuuuauuucaguuuggc

SEQ ID NO: 99958 - RNA, 21 nt, Artificial Sequence
  LRRK2 RNA guide
gaaaacaguauccuucuaaau

SEQ ID NO: 99959 - RNA, 21 nt, Artificial Sequence
  LRRK2 RNA guide
gaaaucauguuucaaagaucc

SEQ ID NO: 99960 - RNA, 21 nt, Artificial Sequence
  LRRK2 RNA guide
gaaggauacuguuuuccaaac

SEQ ID NO: 99961 - RNA, 21 nt, Artificial Sequence
  LRRK2 RNA guide
gaaguagaggugucaaucacu

SEQ ID NO: 99962 - RNA, 21 nt, Artificial Sequence
  LRRK2 RNA guide
gacaccucuacuucagcugaa

SEQ ID NO: 99963 - RNA, 21 nt, Artificial Sequence
  LRRK2 RNA guide
gagcuagugauugacaccucu

SEQ ID NO: 99964 - RNA, 21 nt, Artificial Sequence
  LRRK2 RNA guide
gaggugucaaucacuagcuca

SEQ ID NO: 99965 - RNA, 21 nt, Artificial Sequence
  LRRK2 RNA guide
gauacuguuuuccaaacaggg

SEQ ID NO: 99966 - RNA, 21 nt, Artificial Sequence
  LRRK2 RNA guide
gauggaucuuugaaacaugau

SEQ ID NO: 99967 - RNA, 21 nt, Artificial Sequence
  LRRK2 RNA guide
gaugugaaugaugguaacaua

SEQ ID NO: 99968 - RNA, 21 nt, Artificial Sequence
  LRRK2 RNA guide
gauugacaccucuacuucagc

SEQ ID NO: 99969 - RNA, 21 nt, Artificial Sequence
  LRRK2 RNA guide
gcaaugaugugaaugauggua

SEQ ID NO: 99970 - RNA, 21 nt, Artificial Sequence
  LRRK2 RNA guide
gcccuguuuggaaaacaguau

SEQ ID NO: 99971 - RNA, 21 nt, Artificial Sequence
  LRRK2 RNA guide
gcuagugauugacaccucuac

SEQ ID NO: 99972 - RNA, 21 nt, Artificial Sequence
  LRRK2 RNA guide
gcucaaccuuaaacgaaaugu

SEQ ID NO: 99973 - RNA, 21 nt, Artificial Sequence
  LRRK2 RNA guide
gcugaaguagaggugucaauc

SEQ ID NO: 99974 - RNA, 21 nt, Artificial Sequence
  LRRK2 RNA guide
ggaaaacaguauccuucuaaa

SEQ ID NO: 99975 - RNA, 21 nt, Artificial Sequence
  LRRK2 RNA guide
ggauacuguuuuccaaacagg

SEQ ID NO: 99976 - RNA, 21 nt, Artificial Sequence
  LRRK2 RNA guide
ggcaaugaugugaaugauggu

SEQ ID NO: 99977 - RNA, 21 nt, Artificial Sequence
  LRRK2 RNA guide
gggcaaugaugugaaugaugg

SEQ ID NO: 99978 - RNA, 21 nt, Artificial Sequence
  LRRK2 RNA guide
gguaguuuauaguguaaagaa

SEQ ID NO: 99979 - RNA, 21 nt, Artificial Sequence
  LRRK2 RNA guide
ggugucaaucacuagcucaac

SEQ ID NO: 99980 - RNA, 21 nt, Artificial Sequence
  LRRK2 RNA guide
gguugagcuagugauugacac

SEQ ID NO: 99981 - RNA, 21 nt, Artificial Sequence
  LRRK2 RNA guide
guaacauuuagaaggauacug

SEQ ID NO: 99982 - RNA, 21 nt, Artificial Sequence
  LRRK2 RNA guide
guagaggugucaaucacuagc

SEQ ID NO: 99983 - RNA, 21 nt, Artificial Sequence
  LRRK2 RNA guide
gucaaucacuagcucaaccuu

SEQ ID NO: 99984 - RNA, 21 nt, Artificial Sequence
  LRRK2 RNA guide
gugaaugaugguaacauauua

SEQ ID NO: 99985 - RNA, 21 nt, Artificial Sequence
  LRRK2 RNA guide
gugauugacaccucuacuuca

SEQ ID NO: 99986 - RNA, 21 nt, Artificial Sequence
  LRRK2 RNA guide
gugucaaucacuagcucaacc

SEQ ID NO: 99987 - RNA, 21 nt, Artificial Sequence
  LRRK2 RNA guide
guuaccaucauucacaucauu

SEQ ID NO: 99988 - RNA, 21 nt, Artificial Sequence
  LRRK2 RNA guide
guugagcuagugauugacacc

SEQ ID NO: 99989 - RNA, 21 nt, Artificial Sequence
  LRRK2 RNA guide
guuuaagguugagcuagugau

SEQ ID NO: 99990 - RNA, 21 nt, Artificial Sequence
  LRRK2 RNA guide
guuuggaaaacaguauccuuc

SEQ ID NO: 99991 - RNA, 21 nt, Artificial Sequence
  LRRK2 RNA guide
guuuuaugauggaucuuugaa

SEQ ID NO: 99992 - RNA, 21 nt, Artificial Sequence
  LRRK2 RNA guide
guuuuccaaacagggcaauga

SEQ ID NO: 99993 - RNA, 21 nt, Artificial Sequence
  LRRK2 RNA guide
uaacauuuagaaggauacugu

SEQ ID NO: 99994 - RNA, 21 nt, Artificial Sequence
  LRRK2 RNA guide
uaagguugagcuagugauuga

SEQ ID NO: 99995 - RNA, 21 nt, Artificial Sequence
  LRRK2 RNA guide
uaagucaacuaaaaauacaug

SEQ ID NO: 99996 - RNA, 21 nt, Artificial Sequence
  LRRK2 RNA guide
uaccaucauucacaucauugc

SEQ ID NO: 99997 - RNA, 21 nt, Artificial Sequence
  LRRK2 RNA guide
uacuguuuuccaaacagggca

SEQ ID NO: 99998 - RNA, 21 nt, Artificial Sequence
  LRRK2 RNA guide
uagaaggauacuguuuuccaa

SEQ ID NO: 99999 - RNA, 21 nt, Artificial Sequence
  LRRK2 RNA guide
uagaggugucaaucacuagcu

SEQ ID NO: 100000 - RNA, 21 nt, Artificial Sequence
  LRRK2 RNA guide
uagcucaaccuuaaacgaaau

SEQ ID NO: 100001 - RNA, 21 nt, Artificial Sequence
  LRRK2 RNA guide
uagugauugacaccucuacuu

SEQ ID NO: 100002 - RNA, 21 nt, Artificial Sequence
  LRRK2 RNA guide
uauauuuucagcugaaguaga

SEQ ID NO: 100003 - RNA, 21 nt, Artificial Sequence
  LRRK2 RNA guide
uauguuaccaucauucacauc

SEQ ID NO: 100004 - RNA, 21 nt, Artificial Sequence
  LRRK2 RNA guide
uauucacauuucguuuaaggu

SEQ ID NO: 100005 - RNA, 21 nt, Artificial Sequence
  LRRK2 RNA guide
uauuuucagcugaaguagagg

SEQ ID NO: 100006 - RNA, 21 nt, Artificial Sequence
  LRRK2 RNA guide
ucaaucacuagcucaaccuua

SEQ ID NO: 100007 - RNA, 21 nt, Artificial Sequence
  LRRK2 RNA guide
ucacaucauugcccuguuugg

SEQ ID NO: 100008 - RNA, 21 nt, Artificial Sequence
  LRRK2 RNA guide
ucacauuucguuuaagguuga

SEQ ID NO: 100009 - RNA, 21 nt, Artificial Sequence
  LRRK2 RNA guide
ucacuagcucaaccuuaaacg

SEQ ID NO: 100010 - RNA, 21 nt, Artificial Sequence
  LRRK2 RNA guide
ucagcugaaguagagguguca

SEQ ID NO: 100011 - RNA, 21 nt, Artificial Sequence
  LRRK2 RNA guide
ucauucacaucauugcccugu

SEQ ID NO: 100012 - RNA, 21 nt, Artificial Sequence
  LRRK2 RNA guide
ucauugcccuguuuggaaaac

SEQ ID NO: 100013 - RNA, 21 nt, Artificial Sequence
  LRRK2 RNA guide
uccaaacagggcaaugaugug

SEQ ID NO: 100014 - RNA, 21 nt, Artificial Sequence
  LRRK2 RNA guide
ucguuuaagguugagcuagug

SEQ ID NO: 100015 - RNA, 21 nt, Artificial Sequence
  LRRK2 RNA guide
ucuaagucaacuaaaaauaca

SEQ ID NO: 100016 - RNA, 21 nt, Artificial Sequence
  LRRK2 RNA guide
ugaaaucauguuucaaagauc

SEQ ID NO: 100017 - RNA, 21 nt, Artificial Sequence
  LRRK2 RNA guide
ugaaguagaggugucaaucac

SEQ ID NO: 100018 - RNA, 21 nt, Artificial Sequence
  LRRK2 RNA guide
ugacaccucuacuucagcuga

SEQ ID NO: 100019 - RNA, 21 nt, Artificial Sequence
  LRRK2 RNA guide
ugagcuagugauugacaccuc

SEQ ID NO: 100020 - RNA, 21 nt, Artificial Sequence
  LRRK2 RNA guide
ugauggaucuuugaaacauga

SEQ ID NO: 100021 - RNA, 21 nt, Artificial Sequence
  LRRK2 RNA guide
ugauugacaccucuacuucag

SEQ ID NO: 100022 - RNA, 21 nt, Artificial Sequence
  LRRK2 RNA guide
ugcccuguuuggaaaacagua

SEQ ID NO: 100023 - RNA, 21 nt, Artificial Sequence
  LRRK2 RNA guide
uggaaaacaguauccuucuaa

SEQ ID NO: 100024 - RNA, 21 nt, Artificial Sequence
  LRRK2 RNA guide
ugucaaucacuagcucaaccu

SEQ ID NO: 100025 - RNA, 21 nt, Artificial Sequence
  LRRK2 RNA guide
ugugaaugaugguaacauauu

SEQ ID NO: 100026 - RNA, 21 nt, Artificial Sequence
  LRRK2 RNA guide
uguuaccaucauucacaucau

SEQ ID NO: 100027 - RNA, 21 nt, Artificial Sequence
  LRRK2 RNA guide
uguuuggaaaacaguauccuu

SEQ ID NO: 100028 - RNA, 21 nt, Artificial Sequence
  LRRK2 RNA guide
uguuuuccaaacagggcaaug

SEQ ID NO: 100029 - RNA, 21 nt, Artificial Sequence
  LRRK2 RNA guide
uuaagguugagcuagugauug

SEQ ID NO: 100030 - RNA, 21 nt, Artificial Sequence
  LRRK2 RNA guide
uuaccaucauucacaucauug

SEQ ID NO: 100031 - RNA, 21 nt, Artificial Sequence
  LRRK2 RNA guide
uuagaaggauacuguuuucca

SEQ ID NO: 100032 - RNA, 21 nt, Artificial Sequence
  LRRK2 RNA guide
uuauauuuucagcugaaguag

SEQ ID NO: 100033 - RNA, 21 nt, Artificial Sequence
  LRRK2 RNA guide
uucacaucauugcccuguuug

SEQ ID NO: 100034 - RNA, 21 nt, Artificial Sequence
  LRRK2 RNA guide
uucacauuucguuuaagguug

SEQ ID NO: 100035 - RNA, 21 nt, Artificial Sequence
  LRRK2 RNA guide
uucagcugaaguagagguguc

SEQ ID NO: 100036 - RNA, 21 nt, Artificial Sequence
  LRRK2 RNA guide
uuccaaacagggcaaugaugu

SEQ ID NO: 100037 - RNA, 21 nt, Artificial Sequence
  LRRK2 RNA guide
uucguuuaagguugagcuagu

SEQ ID NO: 100038 - RNA, 21 nt, Artificial Sequence
  LRRK2 RNA guide
uugacaccucuacuucagcug

SEQ ID NO: 100039 - RNA, 21 nt, Artificial Sequence
  LRRK2 RNA guide
uugagcuagugauugacaccu

SEQ ID NO: 100040 - RNA, 21 nt, Artificial Sequence
  LRRK2 RNA guide
uugcccuguuuggaaaacagu

SEQ ID NO: 100041 - RNA, 21 nt, Artificial Sequence
  LRRK2 RNA guide
uuggaaaacaguauccuucua

SEQ ID NO: 100042 - RNA, 21 nt, Artificial Sequence
  LRRK2 RNA guide
uuggcucauguauuuuuaguu

SEQ ID NO: 100043 - RNA, 21 nt, Artificial Sequence
  LRRK2 RNA guide
uuuaagguugagcuagugauu

SEQ ID NO: 100044 - RNA, 21 nt, Artificial Sequence
  LRRK2 RNA guide
uuuagaaggauacuguuuucc

SEQ ID NO: 100045 - RNA, 21 nt, Artificial Sequence
  LRRK2 RNA guide
uuuauauuuucagcugaagua

SEQ ID NO: 100046 - RNA, 21 nt, Artificial Sequence
  LRRK2 RNA guide
uuucagcugaaguagaggugu

SEQ ID NO: 100047 - RNA, 21 nt, Artificial Sequence
  LRRK2 RNA guide
uuucaguuuggcucauguauu

SEQ ID NO: 100048 - RNA, 21 nt, Artificial Sequence
  LRRK2 RNA guide
uuuccaaacagggcaaugaug

SEQ ID NO: 100049 - RNA, 21 nt, Artificial Sequence
  LRRK2 RNA guide
uuucguuuaagguugagcuag

SEQ ID NO: 100050 - RNA, 21 nt, Artificial Sequence
  LRRK2 RNA guide
uuuggaaaacaguauccuucu

SEQ ID NO: 100051 - RNA, 21 nt, Artificial Sequence
  LRRK2 RNA guide
uuuggcucauguauuuuuagu

SEQ ID NO: 100052 - RNA, 21 nt, Artificial Sequence
  LRRK2 RNA guide
uuuucagcugaaguagaggug

SEQ ID NO: 100053 - RNA, 21 nt, Artificial Sequence
  LRRK2 RNA guide
uuuuccaaacagggcaaugau

SEQ ID NO: 100054 - RNA, 22 nt, Artificial Sequence
  LRRK2 RNA guide
aaacagggcaaugaugugaaug

SEQ ID NO: 100055 - RNA, 22 nt, Artificial Sequence
  LRRK2 RNA guide
aacagggcaaugaugugaauga

SEQ ID NO: 100056 - RNA, 22 nt, Artificial Sequence
  LRRK2 RNA guide
aaggauacuguuuuccaaacag

SEQ ID NO: 100057 - RNA, 22 nt, Artificial Sequence
  LRRK2 RNA guide
aagguugagcuagugauugaca

SEQ ID NO: 100058 - RNA, 22 nt, Artificial Sequence
  LRRK2 RNA guide
aaguagaggugucaaucacuag

SEQ ID NO: 100059 - RNA, 22 nt, Artificial Sequence
  LRRK2 RNA guide
aaucacuagcucaaccuuaaac

SEQ ID NO: 100060 - RNA, 22 nt, Artificial Sequence
  LRRK2 RNA guide
acaccucuacuucagcugaaaa

SEQ ID NO: 100061 - RNA, 22 nt, Artificial Sequence
  LRRK2 RNA guide
acagggcaaugaugugaaugau

SEQ ID NO: 100062 - RNA, 22 nt, Artificial Sequence
  LRRK2 RNA guide
acaucauugcccuguuuggaaa

SEQ ID NO: 100063 - RNA, 22 nt, Artificial Sequence
  LRRK2 RNA guide
acauuucguuuaagguugagcu

SEQ ID NO: 100064 - RNA, 22 nt, Artificial Sequence
  LRRK2 RNA guide
accaucauucacaucauugccc

SEQ ID NO: 100065 - RNA, 22 nt, Artificial Sequence
  LRRK2 RNA guide
acuagcucaaccuuaaacgaaa

SEQ ID NO: 100066 - RNA, 22 nt, Artificial Sequence
  LRRK2 RNA guide
acuguuuuccaaacagggcaau

SEQ ID NO: 100067 - RNA, 22 nt, Artificial Sequence
  LRRK2 RNA guide
agaaggauacuguuuuccaaac

SEQ ID NO: 100068 - RNA, 22 nt, Artificial Sequence
  LRRK2 RNA guide
agaggugucaaucacuagcuca

SEQ ID NO: 100069 - RNA, 22 nt, Artificial Sequence
  LRRK2 RNA guide
agcuagugauugacaccucuac

SEQ ID NO: 100070 - RNA, 22 nt, Artificial Sequence
  LRRK2 RNA guide
agcucaaccuuaaacgaaaugu

SEQ ID NO: 100071 - RNA, 22 nt, Artificial Sequence
  LRRK2 RNA guide
agcugaaguagaggugucaauc

SEQ ID NO: 100072 - RNA, 22 nt, Artificial Sequence
  LRRK2 RNA guide
aggauacuguuuuccaaacagg

SEQ ID NO: 100073 - RNA, 22 nt, Artificial Sequence
  LRRK2 RNA guide
agggcaaugaugugaaugaugg

SEQ ID NO: 100074 - RNA, 22 nt, Artificial Sequence
  LRRK2 RNA guide
aggugucaaucacuagcucaac

SEQ ID NO: 100075 - RNA, 22 nt, Artificial Sequence
  LRRK2 RNA guide
agguugagcuagugauugacac

SEQ ID NO: 100076 - RNA, 22 nt, Artificial Sequence
  LRRK2 RNA guide
aguagaggugucaaucacuagc

SEQ ID NO: 100077 - RNA, 22 nt, Artificial Sequence
  LRRK2 RNA guide
agugauugacaccucuacuuca

SEQ ID NO: 100078 - RNA, 22 nt, Artificial Sequence
  LRRK2 RNA guide
auacuguuuuccaaacagggca

SEQ ID NO: 100079 - RNA, 22 nt, Artificial Sequence
  LRRK2 RNA guide
auauguuaccaucauucacauc

SEQ ID NO: 100080 - RNA, 22 nt, Artificial Sequence
  LRRK2 RNA guide
auauucacauuucguuuaaggu

SEQ ID NO: 100081 - RNA, 22 nt, Artificial Sequence
  LRRK2 RNA guide
auauuuucagcugaaguagagg

SEQ ID NO: 100082 - RNA, 22 nt, Artificial Sequence
  LRRK2 RNA guide
aucacuagcucaaccuuaaacg

SEQ ID NO: 100083 - RNA, 22 nt, Artificial Sequence
  LRRK2 RNA guide
aucauucacaucauugcccugu

SEQ ID NO: 100084 - RNA, 22 nt, Artificial Sequence
  LRRK2 RNA guide
aucauugcccuguuuggaaaac

SEQ ID NO: 100085 - RNA, 22 nt, Artificial Sequence
  LRRK2 RNA guide
auguuaccaucauucacaucau

SEQ ID NO: 100086 - RNA, 22 nt, Artificial Sequence
  LRRK2 RNA guide
auucacaucauugcccuguuug

SEQ ID NO: 100087 - RNA, 22 nt, Artificial Sequence
  LRRK2 RNA guide
auucacauuucguuuaagguug

SEQ ID NO: 100088 - RNA, 22 nt, Artificial Sequence
  LRRK2 RNA guide
auugacaccucuacuucagcug

SEQ ID NO: 100089 - RNA, 22 nt, Artificial Sequence
  LRRK2 RNA guide
auugcccuguuuggaaaacagu

SEQ ID NO: 100090 - RNA, 22 nt, Artificial Sequence
  LRRK2 RNA guide
auuucguuuaagguugagcuag

SEQ ID NO: 100091 - RNA, 22 nt, Artificial Sequence
  LRRK2 RNA guide
auuuucagcugaaguagaggug

SEQ ID NO: 100092 - RNA, 22 nt, Artificial Sequence
  LRRK2 RNA guide
caaacagggcaaugaugugaau

SEQ ID NO: 100093 - RNA, 22 nt, Artificial Sequence
  LRRK2 RNA guide
caaucacuagcucaaccuuaaa

SEQ ID NO: 100094 - RNA, 22 nt, Artificial Sequence
  LRRK2 RNA guide
cacaucauugcccuguuuggaa

SEQ ID NO: 100095 - RNA, 22 nt, Artificial Sequence
  LRRK2 RNA guide
cacauuucguuuaagguugagc

SEQ ID NO: 100096 - RNA, 22 nt, Artificial Sequence
  LRRK2 RNA guide
caccucuacuucagcugaaaau

SEQ ID NO: 100097 - RNA, 22 nt, Artificial Sequence
  LRRK2 RNA guide
cacuagcucaaccuuaaacgaa

SEQ ID NO: 100098 - RNA, 22 nt, Artificial Sequence
  LRRK2 RNA guide
cagcugaaguagaggugucaau

SEQ ID NO: 100099 - RNA, 22 nt, Artificial Sequence
  LRRK2 RNA guide
cagggcaaugaugugaaugaug

SEQ ID NO: 100100 - RNA, 22 nt, Artificial Sequence
  LRRK2 RNA guide
caucauucacaucauugcccug

SEQ ID NO: 100101 - RNA, 22 nt, Artificial Sequence
  LRRK2 RNA guide
caucauugcccuguuuggaaaa

SEQ ID NO: 100102 - RNA, 22 nt, Artificial Sequence
  LRRK2 RNA guide
cauucacaucauugcccuguuu

SEQ ID NO: 100103 - RNA, 22 nt, Artificial Sequence
  LRRK2 RNA guide
cauugcccuguuuggaaaacag

SEQ ID NO: 100104 - RNA, 22 nt, Artificial Sequence
  LRRK2 RNA guide
cauuuagaaggauacuguuuuc

SEQ ID NO: 100105 - RNA, 22 nt, Artificial Sequence
  LRRK2 RNA guide
cauuucguuuaagguugagcua

SEQ ID NO: 100106 - RNA, 22 nt, Artificial Sequence
  LRRK2 RNA guide
ccaaacagggcaaugaugugaa

SEQ ID NO: 100107 - RNA, 22 nt, Artificial Sequence
  LRRK2 RNA guide
ccaucauucacaucauugcccu

SEQ ID NO: 100108 - RNA, 22 nt, Artificial Sequence
  LRRK2 RNA guide
cccuguuuggaaaacaguaucc

SEQ ID NO: 100109 - RNA, 22 nt, Artificial Sequence
  LRRK2 RNA guide
ccuguuuggaaaacaguauccu

SEQ ID NO: 100110 - RNA, 22 nt, Artificial Sequence
  LRRK2 RNA guide
cguuuaagguugagcuagugau

SEQ ID NO: 100111 - RNA, 22 nt, Artificial Sequence
  LRRK2 RNA guide
cuaagucaacuaaaaauacaug

SEQ ID NO: 100112 - RNA, 22 nt, Artificial Sequence
  LRRK2 RNA guide
cuagcucaaccuuaaacgaaau

SEQ ID NO: 100113 - RNA, 22 nt, Artificial Sequence
  LRRK2 RNA guide
cuagugauugacaccucuacuu

SEQ ID NO: 100114 - RNA, 22 nt, Artificial Sequence
  LRRK2 RNA guide
cugaaguagaggugucaaucac

SEQ ID NO: 100115 - RNA, 22 nt, Artificial Sequence
  LRRK2 RNA guide
cuguuuggaaaacaguauccuu

SEQ ID NO: 100116 - RNA, 22 nt, Artificial Sequence
  LRRK2 RNA guide
cuguuuuccaaacagggcaaug

SEQ ID NO: 100117 - RNA, 22 nt, Artificial Sequence
  LRRK2 RNA guide
gaaggauacuguuuuccaaaca

SEQ ID NO: 100118 - RNA, 22 nt, Artificial Sequence
  LRRK2 RNA guide
gaaguagaggugucaaucacua

SEQ ID NO: 100119 - RNA, 22 nt, Artificial Sequence
  LRRK2 RNA guide
gacaccucuacuucagcugaaa

SEQ ID NO: 100120 - RNA, 22 nt, Artificial Sequence
  LRRK2 RNA guide
gagcuagugauugacaccucua

SEQ ID NO: 100121 - RNA, 22 nt, Artificial Sequence
  LRRK2 RNA guide
gaggugucaaucacuagcucaa

SEQ ID NO: 100122 - RNA, 22 nt, Artificial Sequence
  LRRK2 RNA guide
gauacuguuuuccaaacagggc

SEQ ID NO: 100123 - RNA, 22 nt, Artificial Sequence
  LRRK2 RNA guide
gauugacaccucuacuucagcu

SEQ ID NO: 100124 - RNA, 22 nt, Artificial Sequence
  LRRK2 RNA guide
gcaaugaugugaaugaugguaa

SEQ ID NO: 100125 - RNA, 22 nt, Artificial Sequence
  LRRK2 RNA guide
gcccuguuuggaaaacaguauc

SEQ ID NO: 100126 - RNA, 22 nt, Artificial Sequence
  LRRK2 RNA guide
gcuagugauugacaccucuacu

SEQ ID NO: 100127 - RNA, 22 nt, Artificial Sequence
  LRRK2 RNA guide
gcucaaccuuaaacgaaaugug

SEQ ID NO: 100128 - RNA, 22 nt, Artificial Sequence
  LRRK2 RNA guide
gcugaaguagaggugucaauca

SEQ ID NO: 100129 - RNA, 22 nt, Artificial Sequence
  LRRK2 RNA guide
ggaaaacaguauccuucuaaau

SEQ ID NO: 100130 - RNA, 22 nt, Artificial Sequence
  LRRK2 RNA guide
ggauacuguuuuccaaacaggg

SEQ ID NO: 100131 - RNA, 22 nt, Artificial Sequence
  LRRK2 RNA guide
ggcaaugaugugaaugauggua

SEQ ID NO: 100132 - RNA, 22 nt, Artificial Sequence
  LRRK2 RNA guide
gggcaaugaugugaaugauggu

SEQ ID NO: 100133 - RNA, 22 nt, Artificial Sequence
  LRRK2 RNA guide
ggugucaaucacuagcucaacc

SEQ ID NO: 100134 - RNA, 22 nt, Artificial Sequence
  LRRK2 RNA guide
gguugagcuagugauugacacc

SEQ ID NO: 100135 - RNA, 22 nt, Artificial Sequence
  LRRK2 RNA guide
guaacauuuagaaggauacugu

SEQ ID NO: 100136 - RNA, 22 nt, Artificial Sequence
  LRRK2 RNA guide
guagaggugucaaucacuagcu

SEQ ID NO: 100137 - RNA, 22 nt, Artificial Sequence
  LRRK2 RNA guide
gucaaucacuagcucaaccuua

SEQ ID NO: 100138 - RNA, 22 nt, Artificial Sequence
  LRRK2 RNA guide
gugauugacaccucuacuucag

SEQ ID NO: 100139 - RNA, 22 nt, Artificial Sequence
  LRRK2 RNA guide
gugucaaucacuagcucaaccu

SEQ ID NO: 100140 - RNA, 22 nt, Artificial Sequence
  LRRK2 RNA guide
guuaccaucauucacaucauug

SEQ ID NO: 100141 - RNA, 22 nt, Artificial Sequence
  LRRK2 RNA guide
guugagcuagugauugacaccu

SEQ ID NO: 100142 - RNA, 22 nt, Artificial Sequence
  LRRK2 RNA guide
guuuaagguugagcuagugauu

SEQ ID NO: 100143 - RNA, 22 nt, Artificial Sequence
  LRRK2 RNA guide
guuuggaaaacaguauccuucu

SEQ ID NO: 100144 - RNA, 22 nt, Artificial Sequence
  LRRK2 RNA guide
guuuuccaaacagggcaaugau

SEQ ID NO: 100145 - RNA, 22 nt, Artificial Sequence
  LRRK2 RNA guide
uaagguugagcuagugauugac

SEQ ID NO: 100146 - RNA, 22 nt, Artificial Sequence
  LRRK2 RNA guide
uaccaucauucacaucauugcc

SEQ ID NO: 100147 - RNA, 22 nt, Artificial Sequence
  LRRK2 RNA guide
uacuguuuuccaaacagggcaa

SEQ ID NO: 100148 - RNA, 22 nt, Artificial Sequence
  LRRK2 RNA guide
uagaaggauacuguuuuccaaa

SEQ ID NO: 100149 - RNA, 22 nt, Artificial Sequence
  LRRK2 RNA guide
uagaggugucaaucacuagcuc

SEQ ID NO: 100150 - RNA, 22 nt, Artificial Sequence
  LRRK2 RNA guide
uagcucaaccuuaaacgaaaug

SEQ ID NO: 100151 - RNA, 22 nt, Artificial Sequence
  LRRK2 RNA guide
uagugauugacaccucuacuuc

SEQ ID NO: 100152 - RNA, 22 nt, Artificial Sequence
  LRRK2 RNA guide
uauauuuucagcugaaguagag

SEQ ID NO: 100153 - RNA, 22 nt, Artificial Sequence
  LRRK2 RNA guide
uauguuaccaucauucacauca

SEQ ID NO: 100154 - RNA, 22 nt, Artificial Sequence
  LRRK2 RNA guide
uauucacauuucguuuaagguu

SEQ ID NO: 100155 - RNA, 22 nt, Artificial Sequence
  LRRK2 RNA guide
uauuuucagcugaaguagaggu

SEQ ID NO: 100156 - RNA, 22 nt, Artificial Sequence
  LRRK2 RNA guide
ucaaucacuagcucaaccuuaa

SEQ ID NO: 100157 - RNA, 22 nt, Artificial Sequence
  LRRK2 RNA guide
ucacaucauugcccuguuugga

SEQ ID NO: 100158 - RNA, 22 nt, Artificial Sequence
  LRRK2 RNA guide
ucacauuucguuuaagguugag

SEQ ID NO: 100159 - RNA, 22 nt, Artificial Sequence
  LRRK2 RNA guide
ucacuagcucaaccuuaaacga

SEQ ID NO: 100160 - RNA, 22 nt, Artificial Sequence
  LRRK2 RNA guide
ucagcugaaguagaggugucaa

SEQ ID NO: 100161 - RNA, 22 nt, Artificial Sequence
  LRRK2 RNA guide
ucauucacaucauugcccuguu

SEQ ID NO: 100162 - RNA, 22 nt, Artificial Sequence
  LRRK2 RNA guide
ucauugcccuguuuggaaaaca

SEQ ID NO: 100163 - RNA, 22 nt, Artificial Sequence
  LRRK2 RNA guide
uccaaacagggcaaugauguga

SEQ ID NO: 100164 - RNA, 22 nt, Artificial Sequence
  LRRK2 RNA guide
ucguuuaagguugagcuaguga

SEQ ID NO: 100165 - RNA, 22 nt, Artificial Sequence
  LRRK2 RNA guide
ucuaagucaacuaaaaauacau

SEQ ID NO: 100166 - RNA, 22 nt, Artificial Sequence
  LRRK2 RNA guide
ugaaguagaggugucaaucacu

SEQ ID NO: 100167 - RNA, 22 nt, Artificial Sequence
  LRRK2 RNA guide
ugacaccucuacuucagcugaa

SEQ ID NO: 100168 - RNA, 22 nt, Artificial Sequence
  LRRK2 RNA guide
ugagcuagugauugacaccucu

SEQ ID NO: 100169 - RNA, 22 nt, Artificial Sequence
  LRRK2 RNA guide
ugauugacaccucuacuucagc

SEQ ID NO: 100170 - RNA, 22 nt, Artificial Sequence
  LRRK2 RNA guide
ugcccuguuuggaaaacaguau

SEQ ID NO: 100171 - RNA, 22 nt, Artificial Sequence
  LRRK2 RNA guide
ugucaaucacuagcucaaccuu

SEQ ID NO: 100172 - RNA, 22 nt, Artificial Sequence
  LRRK2 RNA guide
uguuaccaucauucacaucauu

SEQ ID NO: 100173 - RNA, 22 nt, Artificial Sequence
  LRRK2 RNA guide
uguuuuccaaacagggcaauga

SEQ ID NO: 100174 - RNA, 22 nt, Artificial Sequence
  LRRK2 RNA guide
uuaagguugagcuagugauuga

SEQ ID NO: 100175 - RNA, 22 nt, Artificial Sequence
  LRRK2 RNA guide
uuaccaucauucacaucauugc

SEQ ID NO: 100176 - RNA, 22 nt, Artificial Sequence
  LRRK2 RNA guide
uuagaaggauacuguuuuccaa

SEQ ID NO: 100177 - RNA, 22 nt, Artificial Sequence
  LRRK2 RNA guide
uuauauuuucagcugaaguaga

SEQ ID NO: 100178 - RNA, 22 nt, Artificial Sequence
  LRRK2 RNA guide
uucacaucauugcccuguuugg

SEQ ID NO: 100179 - RNA, 22 nt, Artificial Sequence
  LRRK2 RNA guide
uucacauuucguuuaagguuga

SEQ ID NO: 100180 - RNA, 22 nt, Artificial Sequence
  LRRK2 RNA guide
uucagcugaaguagagguguca

SEQ ID NO: 100181 - RNA, 22 nt, Artificial Sequence
  LRRK2 RNA guide
uuccaaacagggcaaugaugug

SEQ ID NO: 100182 - RNA, 22 nt, Artificial Sequence
  LRRK2 RNA guide
uucguuuaagguugagcuagug

SEQ ID NO: 100183 - RNA, 22 nt, Artificial Sequence
  LRRK2 RNA guide
uugacaccucuacuucagcuga

SEQ ID NO: 100184 - RNA, 22 nt, Artificial Sequence
  LRRK2 RNA guide
uugagcuagugauugacaccuc

SEQ ID NO: 100185 - RNA, 22 nt, Artificial Sequence
  LRRK2 RNA guide
uugcccuguuuggaaaacagua

SEQ ID NO: 100186 - RNA, 22 nt, Artificial Sequence
  LRRK2 RNA guide
uuuaagguugagcuagugauug

SEQ ID NO: 100187 - RNA, 22 nt, Artificial Sequence
  LRRK2 RNA guide
uuuagaaggauacuguuuucca

SEQ ID NO: 100188 - RNA, 22 nt, Artificial Sequence
  LRRK2 RNA guide
uuuauauuuucagcugaaguag

SEQ ID NO: 100189 - RNA, 22 nt, Artificial Sequence
  LRRK2 RNA guide
uuucagcugaaguagagguguc

SEQ ID NO: 100190 - RNA, 22 nt, Artificial Sequence
  LRRK2 RNA guide
uuuccaaacagggcaaugaugu

SEQ ID NO: 100191 - RNA, 22 nt, Artificial Sequence
  LRRK2 RNA guide
uuucguuuaagguugagcuagu

SEQ ID NO: 100192 - RNA, 22 nt, Artificial Sequence
  LRRK2 RNA guide
uuuucagcugaaguagaggugu

SEQ ID NO: 100193 - RNA, 22 nt, Artificial Sequence
  LRRK2 RNA guide
uuuuccaaacagggcaaugaug

SEQ ID NO: 100194 - RNA, 20 nt, Artificial Sequence
  LRRK2 RNA guide
aaaaagugcugaacucuaca

SEQ ID NO: 100195 - RNA, 20 nt, Artificial Sequence
  LRRK2 RNA guide
aaaaauggguucgguuuuag

SEQ ID NO: 100196 - RNA, 20 nt, Artificial Sequence
  LRRK2 RNA guide
aaaaccaacaguauggaugg

SEQ ID NO: 100197 - RNA, 20 nt, Artificial Sequence
  LRRK2 RNA guide
aaaaccgaacccauuuuuau

SEQ ID NO: 100198 - RNA, 20 nt, Artificial Sequence
  LRRK2 RNA guide
aaaacgucuccuuccaaaca

SEQ ID NO: 100199 - RNA, 20 nt, Artificial Sequence
  LRRK2 RNA guide
aaaagugcugaacucuacaa

SEQ ID NO: 100200 - RNA, 20 nt, Artificial Sequence
  LRRK2 RNA guide
aaaaucacagucagagguuc

SEQ ID NO: 100201 - RNA, 20 nt, Artificial Sequence
  LRRK2 RNA guide
aaaaugcaacuuugucacua

SEQ ID NO: 100202 - RNA, 20 nt, Artificial Sequence
  LRRK2 RNA guide
aaaauggguucgguuuuagu

SEQ ID NO: 100203 - RNA, 20 nt, Artificial Sequence
  LRRK2 RNA guide
aaaauuuggcuugaggaacc

SEQ ID NO: 100204 - RNA, 20 nt, Artificial Sequence
  LRRK2 RNA guide
aaacacuaaugaauucaucu

SEQ ID NO: 100205 - RNA, 20 nt, Artificial Sequence
  LRRK2 RNA guide
aaacagaagggagaaugagu

SEQ ID NO: 100206 - RNA, 20 nt, Artificial Sequence
  LRRK2 RNA guide
aaaccaacaguauggauggu

SEQ ID NO: 100207 - RNA, 20 nt, Artificial Sequence
  LRRK2 RNA guide
aaaccgaacccauuuuuauc

SEQ ID NO: 100208 - RNA, 20 nt, Artificial Sequence
  LRRK2 RNA guide
aaacgggaugaagagcccca

SEQ ID NO: 100209 - RNA, 20 nt, Artificial Sequence
  LRRK2 RNA guide
aaacgucuccuuccaaacag

SEQ ID NO: 100210 - RNA, 20 nt, Artificial Sequence
  LRRK2 RNA guide
aaacucuuguagaguucagc

SEQ ID NO: 100211 - RNA, 20 nt, Artificial Sequence
  LRRK2 RNA guide
aaagacacucagggaacaca

SEQ ID NO: 100212 - RNA, 20 nt, Artificial Sequence
  LRRK2 RNA guide
aaagauuucuagccuuuagu

SEQ ID NO: 100213 - RNA, 20 nt, Artificial Sequence
  LRRK2 RNA guide
aaaggcauuguuuucacuuc

SEQ ID NO: 100214 - RNA, 20 nt, Artificial Sequence
  LRRK2 RNA guide
aaagugcugaacucuacaag

SEQ ID NO: 100215 - RNA, 20 nt, Artificial Sequence
  LRRK2 RNA guide
aaaguuacuucuuaaagaca

SEQ ID NO: 100216 - RNA, 20 nt, Artificial Sequence
  LRRK2 RNA guide
aaaucacagucagagguucc

SEQ ID NO: 100217 - RNA, 20 nt, Artificial Sequence
  LRRK2 RNA guide
aaaucauuacgcaauguaaa

SEQ ID NO: 100218 - RNA, 20 nt, Artificial Sequence
  LRRK2 RNA guide
aaaugcaacuuugucacuag

SEQ ID NO: 100219 - RNA, 20 nt, Artificial Sequence
  LRRK2 RNA guide
aaauggguucgguuuuaguc

SEQ ID NO: 100220 - RNA, 20 nt, Artificial Sequence
  LRRK2 RNA guide
aaauuuggcuugaggaaccu

SEQ ID NO: 100221 - RNA, 20 nt, Artificial Sequence
  LRRK2 RNA guide
aaauuuugggaauaaccaag

SEQ ID NO: 100222 - RNA, 20 nt, Artificial Sequence
  LRRK2 RNA guide
aacacauacuggggcucuuc

SEQ ID NO: 100223 - RNA, 20 nt, Artificial Sequence
  LRRK2 RNA guide
aacacuaaugaauucaucuu

SEQ ID NO: 100224 - RNA, 20 nt, Artificial Sequence
  LRRK2 RNA guide
aacagaagggagaaugaguu

SEQ ID NO: 100225 - RNA, 20 nt, Artificial Sequence
  LRRK2 RNA guide
aacaguauggauggugguag

SEQ ID NO: 100226 - RNA, 20 nt, Artificial Sequence
  LRRK2 RNA guide
aacauugccaguaaaacguc

SEQ ID NO: 100227 - RNA, 20 nt, Artificial Sequence
  LRRK2 RNA guide
aaccaacaguauggauggug

SEQ ID NO: 100228 - RNA, 20 nt, Artificial Sequence
  LRRK2 RNA guide
aaccaagaacucucggcuau

SEQ ID NO: 100229 - RNA, 20 nt, Artificial Sequence
  LRRK2 RNA guide
aacccauuuuuauccuccuu

SEQ ID NO: 100230 - RNA, 20 nt, Artificial Sequence
  LRRK2 RNA guide
aaccgaacccauuuuuaucc

SEQ ID NO: 100231 - RNA, 20 nt, Artificial Sequence
  LRRK2 RNA guide
aaccucugacugugauuuua

SEQ ID NO: 100232 - RNA, 20 nt, Artificial Sequence
  LRRK2 RNA guide
aacgagacuaaaaccgaacc

SEQ ID NO: 100233 - RNA, 20 nt, Artificial Sequence
  LRRK2 RNA guide
aacgggaugaagagccccag

SEQ ID NO: 100234 - RNA, 20 nt, Artificial Sequence
  LRRK2 RNA guide
aacgucuccuuccaaacaga

SEQ ID NO: 100235 - RNA, 20 nt, Artificial Sequence
  LRRK2 RNA guide
aacucauucucccuucuguu

SEQ ID NO: 100236 - RNA, 20 nt, Artificial Sequence
  LRRK2 RNA guide
aacucuacaagaguuugcua

SEQ ID NO: 100237 - RNA, 20 nt, Artificial Sequence
  LRRK2 RNA guide
aacucucggcuauauuaaca

SEQ ID NO: 100238 - RNA, 20 nt, Artificial Sequence
  LRRK2 RNA guide
aacucuuguagaguucagca

SEQ ID NO: 100239 - RNA, 20 nt, Artificial Sequence
  LRRK2 RNA guide
aacuuugucacuagcaaacu

SEQ ID NO: 100240 - RNA, 20 nt, Artificial Sequence
  LRRK2 RNA guide
aagaacucucggcuauauua

SEQ ID NO: 100241 - RNA, 20 nt, Artificial Sequence
  LRRK2 RNA guide
aagacacucagggaacacau

SEQ ID NO: 100242 - RNA, 20 nt, Artificial Sequence
  LRRK2 RNA guide
aagagccccaguauguguuc

SEQ ID NO: 100243 - RNA, 20 nt, Artificial Sequence
  LRRK2 RNA guide
aagaguuugcuagugacaaa

SEQ ID NO: 100244 - RNA, 20 nt, Artificial Sequence
  LRRK2 RNA guide
aagauacuuggaauagucaa

SEQ ID NO: 100245 - RNA, 20 nt, Artificial Sequence
  LRRK2 RNA guide
aagauuucuagccuuuaguu

SEQ ID NO: 100246 - RNA, 20 nt, Artificial Sequence
  LRRK2 RNA guide
aagccaaauuuugggaauaa

SEQ ID NO: 100247 - RNA, 20 nt, Artificial Sequence
  LRRK2 RNA guide
aaggagacguuuuacuggca

SEQ ID NO: 100248 - RNA, 20 nt, Artificial Sequence
  LRRK2 RNA guide
aaggaggauaaaaauggguu

SEQ ID NO: 100249 - RNA, 20 nt, Artificial Sequence
  LRRK2 RNA guide
aaggcauuguuuucacuuca

SEQ ID NO: 100250 - RNA, 20 nt, Artificial Sequence
  LRRK2 RNA guide
aagggagaaugaguugaagu

SEQ ID NO: 100251 - RNA, 20 nt, Artificial Sequence
  LRRK2 RNA guide
aagguauacuacaacuaaag

SEQ ID NO: 100252 - RNA, 20 nt, Artificial Sequence
  LRRK2 RNA guide
aaguaucuucccaauacaga

SEQ ID NO: 100253 - RNA, 20 nt, Artificial Sequence
  LRRK2 RNA guide
aaguuacuucuuaaagacac

SEQ ID NO: 100254 - RNA, 20 nt, Artificial Sequence
  LRRK2 RNA guide
aauaaccaagaacucucggc

SEQ ID NO: 100255 - RNA, 20 nt, Artificial Sequence
  LRRK2 RNA guide
aauaacgagacuaaaaccga

SEQ ID NO: 100256 - RNA, 20 nt, Artificial Sequence
  LRRK2 RNA guide
aauacagagcauguccuaga

SEQ ID NO: 100257 - RNA, 20 nt, Artificial Sequence
  LRRK2 RNA guide
aauauagccgagaguucuug

SEQ ID NO: 100258 - RNA, 20 nt, Artificial Sequence
  LRRK2 RNA guide
aaucauuacgcaauguaaac

SEQ ID NO: 100259 - RNA, 20 nt, Artificial Sequence
  LRRK2 RNA guide
aaucuucucaucuaggacau

SEQ ID NO: 100260 - RNA, 20 nt, Artificial Sequence
  LRRK2 RNA guide
aaugaauucaucuugccaau

SEQ ID NO: 100261 - RNA, 20 nt, Artificial Sequence
  LRRK2 RNA guide
aaugcaacuuugucacuagc

SEQ ID NO: 100262 - RNA, 20 nt, Artificial Sequence
  LRRK2 RNA guide
aauggguucgguuuuagucu

SEQ ID NO: 100263 - RNA, 20 nt, Artificial Sequence
  LRRK2 RNA guide
aauguaaacgggaugaagag

SEQ ID NO: 100264 - RNA, 20 nt, Artificial Sequence
  LRRK2 RNA guide
aauguuaauauagccgagag

SEQ ID NO: 100265 - RNA, 20 nt, Artificial Sequence
  LRRK2 RNA guide
aauucaucuugccaauaacg

SEQ ID NO: 100266 - RNA, 20 nt, Artificial Sequence
  LRRK2 RNA guide
aauuuggcuugaggaaccuc

SEQ ID NO: 100267 - RNA, 20 nt, Artificial Sequence
  LRRK2 RNA guide
aauuuugggaauaaccaaga

SEQ ID NO: 100268 - RNA, 20 nt, Artificial Sequence
  LRRK2 RNA guide
acaacuaaaggcuagaaauc

SEQ ID NO: 100269 - RNA, 20 nt, Artificial Sequence
  LRRK2 RNA guide
acaagaguuugcuagugaca

SEQ ID NO: 100270 - RNA, 20 nt, Artificial Sequence
  LRRK2 RNA guide
acaagguauacuacaacuaa

SEQ ID NO: 100271 - RNA, 20 nt, Artificial Sequence
  LRRK2 RNA guide
acacauacuggggcucuuca

SEQ ID NO: 100272 - RNA, 20 nt, Artificial Sequence
  LRRK2 RNA guide
acacuaaugaauucaucuug

SEQ ID NO: 100273 - RNA, 20 nt, Artificial Sequence
  LRRK2 RNA guide
acacucagggaacacauacu

SEQ ID NO: 100274 - RNA, 20 nt, Artificial Sequence
  LRRK2 RNA guide
acagaagggagaaugaguug

SEQ ID NO: 100275 - RNA, 20 nt, Artificial Sequence
  LRRK2 RNA guide
acagagcauguccuagauga

SEQ ID NO: 100276 - RNA, 20 nt, Artificial Sequence
  LRRK2 RNA guide
acaguauggauggugguaga

SEQ ID NO: 100277 - RNA, 20 nt, Artificial Sequence
  LRRK2 RNA guide
acagucagagguuccucaag

SEQ ID NO: 100278 - RNA, 20 nt, Artificial Sequence
  LRRK2 RNA guide
acauacuggggcucuucauc

SEQ ID NO: 100279 - RNA, 20 nt, Artificial Sequence
  LRRK2 RNA guide
acaugcucuguauugggaag

SEQ ID NO: 100280 - RNA, 20 nt, Artificial Sequence
  LRRK2 RNA guide
acauugccaguaaaacgucu

SEQ ID NO: 100281 - RNA, 20 nt, Artificial Sequence
  LRRK2 RNA guide
accaacaguauggauggugg

SEQ ID NO: 100282 - RNA, 20 nt, Artificial Sequence
  LRRK2 RNA guide
accaagaacucucggcuaua

SEQ ID NO: 100283 - RNA, 20 nt, Artificial Sequence
  LRRK2 RNA guide
accaccauccauacuguugg

SEQ ID NO: 100284 - RNA, 20 nt, Artificial Sequence
  LRRK2 RNA guide
accauccauacuguugguuu

SEQ ID NO: 100285 - RNA, 20 nt, Artificial Sequence
  LRRK2 RNA guide
acccauuuuuauccuccuuc

SEQ ID NO: 100286 - RNA, 20 nt, Artificial Sequence
  LRRK2 RNA guide
accgaacccauuuuuauccu

SEQ ID NO: 100287 - RNA, 20 nt, Artificial Sequence
  LRRK2 RNA guide
accucugacugugauuuuaa

SEQ ID NO: 100288 - RNA, 20 nt, Artificial Sequence
  LRRK2 RNA guide
acgagacuaaaaccgaaccc

SEQ ID NO: 100289 - RNA, 20 nt, Artificial Sequence
  LRRK2 RNA guide
acgcaauguaaacgggauga

SEQ ID NO: 100290 - RNA, 20 nt, Artificial Sequence
  LRRK2 RNA guide
acgggaugaagagccccagu

SEQ ID NO: 100291 - RNA, 20 nt, Artificial Sequence
  LRRK2 RNA guide
acgucuccuuccaaacagaa

SEQ ID NO: 100292 - RNA, 20 nt, Artificial Sequence
  LRRK2 RNA guide
acuaaaaccgaacccauuuu

SEQ ID NO: 100293 - RNA, 20 nt, Artificial Sequence
  LRRK2 RNA guide
acuacaacuaaaggcuagaa

SEQ ID NO: 100294 - RNA, 20 nt, Artificial Sequence
  LRRK2 RNA guide
acuagcaaacucuuguagag

SEQ ID NO: 100295 - RNA, 20 nt, Artificial Sequence
  LRRK2 RNA guide
acuauucauaaucuucucau

SEQ ID NO: 100296 - RNA, 20 nt, Artificial Sequence
  LRRK2 RNA guide
acuauuccaaguaucuuccc

SEQ ID NO: 100297 - RNA, 20 nt, Artificial Sequence
  LRRK2 RNA guide
acucagggaacacauacugg

SEQ ID NO: 100298 - RNA, 20 nt, Artificial Sequence
  LRRK2 RNA guide
acucauucucccuucuguuu

SEQ ID NO: 100299 - RNA, 20 nt, Artificial Sequence
  LRRK2 RNA guide
acucuacaagaguuugcuag

SEQ ID NO: 100300 - RNA, 20 nt, Artificial Sequence
  LRRK2 RNA guide
acucucggcuauauuaacau

SEQ ID NO: 100301 - RNA, 20 nt, Artificial Sequence
  LRRK2 RNA guide
acucuuguagaguucagcac

SEQ ID NO: 100302 - RNA, 20 nt, Artificial Sequence
  LRRK2 RNA guide
acuggcaauguuaauauagc

SEQ ID NO: 100303 - RNA, 20 nt, Artificial Sequence
  LRRK2 RNA guide
acuggggcucuucaucccgu

SEQ ID NO: 100304 - RNA, 20 nt, Artificial Sequence
  LRRK2 RNA guide
acuucaacucauucucccuu

SEQ ID NO: 100305 - RNA, 20 nt, Artificial Sequence
  LRRK2 RNA guide
acuucuuaaagacacucagg

SEQ ID NO: 100306 - RNA, 20 nt, Artificial Sequence
  LRRK2 RNA guide
acuugacuauuccaaguauc

SEQ ID NO: 100307 - RNA, 20 nt, Artificial Sequence
  LRRK2 RNA guide
acuuggaauagucaagucua

SEQ ID NO: 100308 - RNA, 20 nt, Artificial Sequence
  LRRK2 RNA guide
acuuugucacuagcaaacuc

SEQ ID NO: 100309 - RNA, 20 nt, Artificial Sequence
  LRRK2 RNA guide
agaacucucggcuauauuaa

SEQ ID NO: 100310 - RNA, 20 nt, Artificial Sequence
  LRRK2 RNA guide
agaaggaggauaaaaauggg

SEQ ID NO: 100311 - RNA, 20 nt, Artificial Sequence
  LRRK2 RNA guide
agaagggagaaugaguugaa

SEQ ID NO: 100312 - RNA, 20 nt, Artificial Sequence
  LRRK2 RNA guide
agaaugaguugaagugaaaa

SEQ ID NO: 100313 - RNA, 20 nt, Artificial Sequence
  LRRK2 RNA guide
agacacucagggaacacaua

SEQ ID NO: 100314 - RNA, 20 nt, Artificial Sequence
  LRRK2 RNA guide
agacguuuuacuggcaaugu

SEQ ID NO: 100315 - RNA, 20 nt, Artificial Sequence
  LRRK2 RNA guide
agacuaaaaccgaacccauu

SEQ ID NO: 100316 - RNA, 20 nt, Artificial Sequence
  LRRK2 RNA guide
agacuugacuauuccaagua

SEQ ID NO: 100317 - RNA, 20 nt, Artificial Sequence
  LRRK2 RNA guide
agagcauguccuagaugaga

SEQ ID NO: 100318 - RNA, 20 nt, Artificial Sequence
  LRRK2 RNA guide
agagccccaguauguguucc

SEQ ID NO: 100319 - RNA, 20 nt, Artificial Sequence
  LRRK2 RNA guide
agagguuccucaagccaaau

SEQ ID NO: 100320 - RNA, 20 nt, Artificial Sequence
  LRRK2 RNA guide
agaguucuugguuauuccca

SEQ ID NO: 100321 - RNA, 20 nt, Artificial Sequence
  LRRK2 RNA guide
agaguuugcuagugacaaag

SEQ ID NO: 100322 - RNA, 20 nt, Artificial Sequence
  LRRK2 RNA guide
agauacuuggaauagucaag

SEQ ID NO: 100323 - RNA, 20 nt, Artificial Sequence
  LRRK2 RNA guide
agauuaugaauaguuuggaa

SEQ ID NO: 100324 - RNA, 20 nt, Artificial Sequence
  LRRK2 RNA guide
agauuucuagccuuuaguug

SEQ ID NO: 100325 - RNA, 20 nt, Artificial Sequence
  LRRK2 RNA guide
agcaaacucuuguagaguuc

SEQ ID NO: 100326 - RNA, 20 nt, Artificial Sequence
  LRRK2 RNA guide
agcauguccuagaugagaag

SEQ ID NO: 100327 - RNA, 20 nt, Artificial Sequence
  LRRK2 RNA guide
agccaaauuuugggaauaac

SEQ ID NO: 100328 - RNA, 20 nt, Artificial Sequence
  LRRK2 RNA guide
agccccaguauguguucccu

SEQ ID NO: 100329 - RNA, 20 nt, Artificial Sequence
  LRRK2 RNA guide
agccgagaguucuugguuau

SEQ ID NO: 100330 - RNA, 20 nt, Artificial Sequence
  LRRK2 RNA guide
agccuuuaguuguaguauac

SEQ ID NO: 100331 - RNA, 20 nt, Artificial Sequence
  LRRK2 RNA guide
aggaaccucugacugugauu

SEQ ID NO: 100332 - RNA, 20 nt, Artificial Sequence
  LRRK2 RNA guide
aggacaugcucuguauuggg

SEQ ID NO: 100333 - RNA, 20 nt, Artificial Sequence
  LRRK2 RNA guide
aggagacguuuuacuggcaa

SEQ ID NO: 100334 - RNA, 20 nt, Artificial Sequence
  LRRK2 RNA guide
aggaggauaaaaauggguuc

SEQ ID NO: 100335 - RNA, 20 nt, Artificial Sequence
  LRRK2 RNA guide
aggauaaaaauggguucggu

SEQ ID NO: 100336 - RNA, 20 nt, Artificial Sequence
  LRRK2 RNA guide
aggcauuguuuucacuucaa

SEQ ID NO: 100337 - RNA, 20 nt, Artificial Sequence
  LRRK2 RNA guide
agggaacacauacuggggcu

SEQ ID NO: 100338 - RNA, 20 nt, Artificial Sequence
  LRRK2 RNA guide
agggagaaugaguugaagug

SEQ ID NO: 100339 - RNA, 20 nt, Artificial Sequence
  LRRK2 RNA guide
agguauacuacaacuaaagg

SEQ ID NO: 100340 - RNA, 20 nt, Artificial Sequence
  LRRK2 RNA guide
agguuccucaagccaaauuu

SEQ ID NO: 100341 - RNA, 20 nt, Artificial Sequence
  LRRK2 RNA guide
aguaaaacgucuccuuccaa

SEQ ID NO: 100342 - RNA, 20 nt, Artificial Sequence
  LRRK2 RNA guide
aguaucuucccaauacagag

SEQ ID NO: 100343 - RNA, 20 nt, Artificial Sequence
  LRRK2 RNA guide
aguauggauggugguagaag

SEQ ID NO: 100344 - RNA, 20 nt, Artificial Sequence
  LRRK2 RNA guide
aguauguguucccugagugu

SEQ ID NO: 100345 - RNA, 20 nt, Artificial Sequence
  LRRK2 RNA guide
agucagagguuccucaagcc

SEQ ID NO: 100346 - RNA, 20 nt, Artificial Sequence
  LRRK2 RNA guide
agucucguuauuggcaagau

SEQ ID NO: 100347 - RNA, 20 nt, Artificial Sequence
  LRRK2 RNA guide
agugacaaaguugcauuuua

SEQ ID NO: 100348 - RNA, 20 nt, Artificial Sequence
  LRRK2 RNA guide
agugauaaaaugcaacuuug

SEQ ID NO: 100349 - RNA, 20 nt, Artificial Sequence
  LRRK2 RNA guide
agugcugaacucuacaagag

SEQ ID NO: 100350 - RNA, 20 nt, Artificial Sequence
  LRRK2 RNA guide
aguguuuagacuugacuauu

SEQ ID NO: 100351 - RNA, 20 nt, Artificial Sequence
  LRRK2 RNA guide
aguuacuucuuaaagacacu

SEQ ID NO: 100352 - RNA, 20 nt, Artificial Sequence
  LRRK2 RNA guide
aguucuugguuauucccaaa

SEQ ID NO: 100353 - RNA, 20 nt, Artificial Sequence
  LRRK2 RNA guide
aguugaagugaaaacaaugc

SEQ ID NO: 100354 - RNA, 20 nt, Artificial Sequence
  LRRK2 RNA guide
aguuugcuagugacaaaguu

SEQ ID NO: 100355 - RNA, 20 nt, Artificial Sequence
  LRRK2 RNA guide
auaaaaauggguucgguuuu

SEQ ID NO: 100356 - RNA, 20 nt, Artificial Sequence
  LRRK2 RNA guide
auaaaaccaacaguauggau

SEQ ID NO: 100357 - RNA, 20 nt, Artificial Sequence
  LRRK2 RNA guide
auaaaaugcaacuuugucac

SEQ ID NO: 100358 - RNA, 20 nt, Artificial Sequence
  LRRK2 RNA guide
auaaccaagaacucucggcu

SEQ ID NO: 100359 - RNA, 20 nt, Artificial Sequence
  LRRK2 RNA guide
auaacgagacuaaaaccgaa

SEQ ID NO: 100360 - RNA, 20 nt, Artificial Sequence
  LRRK2 RNA guide
auaaucuucucaucuaggac

SEQ ID NO: 100361 - RNA, 20 nt, Artificial Sequence
  LRRK2 RNA guide
auacagagcauguccuagau

SEQ ID NO: 100362 - RNA, 20 nt, Artificial Sequence
  LRRK2 RNA guide
auacuacaacuaaaggcuag

SEQ ID NO: 100363 - RNA, 20 nt, Artificial Sequence
  LRRK2 RNA guide
auacuggggcucuucauccc

SEQ ID NO: 100364 - RNA, 20 nt, Artificial Sequence
  LRRK2 RNA guide
auagccgagaguucuugguu

SEQ ID NO: 100365 - RNA, 20 nt, Artificial Sequence
  LRRK2 RNA guide
auauagccgagaguucuugg

SEQ ID NO: 100366 - RNA, 20 nt, Artificial Sequence
  LRRK2 RNA guide
auauuaacauugccaguaaa

SEQ ID NO: 100367 - RNA, 20 nt, Artificial Sequence
  LRRK2 RNA guide
auauucccaucuuaaaauca

SEQ ID NO: 100368 - RNA, 20 nt, Artificial Sequence
  LRRK2 RNA guide
aucacagucagagguuccuc

SEQ ID NO: 100369 - RNA, 20 nt, Artificial Sequence
  LRRK2 RNA guide
aucauuacgcaauguaaacg

SEQ ID NO: 100370 - RNA, 20 nt, Artificial Sequence
  LRRK2 RNA guide
aucccguuuacauugcguaa

SEQ ID NO: 100371 - RNA, 20 nt, Artificial Sequence
  LRRK2 RNA guide
auccuccuucuaccaccauc

SEQ ID NO: 100372 - RNA, 20 nt, Artificial Sequence
  LRRK2 RNA guide
aucuaggacaugcucuguau

SEQ ID NO: 100373 - RNA, 20 nt, Artificial Sequence
  LRRK2 RNA guide
aucuuaaaaucacagucaga

SEQ ID NO: 100374 - RNA, 20 nt, Artificial Sequence
  LRRK2 RNA guide
aucuucccaauacagagcau

SEQ ID NO: 100375 - RNA, 20 nt, Artificial Sequence
  LRRK2 RNA guide
aucuucucaucuaggacaug

SEQ ID NO: 100376 - RNA, 20 nt, Artificial Sequence
  LRRK2 RNA guide
aucuugccaauaacgagacu

SEQ ID NO: 100377 - RNA, 20 nt, Artificial Sequence
  LRRK2 RNA guide
augaagagccccaguaugug

SEQ ID NO: 100378 - RNA, 20 nt, Artificial Sequence
  LRRK2 RNA guide
augaauaguuuggaaaaggg

SEQ ID NO: 100379 - RNA, 20 nt, Artificial Sequence
  LRRK2 RNA guide
augaauucaucuugccaaua

SEQ ID NO: 100380 - RNA, 20 nt, Artificial Sequence
  LRRK2 RNA guide
augaguugaagugaaaacaa

SEQ ID NO: 100381 - RNA, 20 nt, Artificial Sequence
  LRRK2 RNA guide
augcaacuuugucacuagca

SEQ ID NO: 100382 - RNA, 20 nt, Artificial Sequence
  LRRK2 RNA guide
augcucuguauugggaagau

SEQ ID NO: 100383 - RNA, 20 nt, Artificial Sequence
  LRRK2 RNA guide
auggauggugguagaaggag

SEQ ID NO: 100384 - RNA, 20 nt, Artificial Sequence
  LRRK2 RNA guide
auggguucgguuuuagucuc

SEQ ID NO: 100385 - RNA, 20 nt, Artificial Sequence
  LRRK2 RNA guide
auggugguagaaggaggaua

SEQ ID NO: 100386 - RNA, 20 nt, Artificial Sequence
  LRRK2 RNA guide
auguaaacgggaugaagagc

SEQ ID NO: 100387 - RNA, 20 nt, Artificial Sequence
  LRRK2 RNA guide
auguccuagaugagaagauu

SEQ ID NO: 100388 - RNA, 20 nt, Artificial Sequence
  LRRK2 RNA guide
auguguucccugagugucuu

SEQ ID NO: 100389 - RNA, 20 nt, Artificial Sequence
  LRRK2 RNA guide
auguuaauauagccgagagu

SEQ ID NO: 100390 - RNA, 20 nt, Artificial Sequence
  LRRK2 RNA guide
auuaacauugccaguaaaac

SEQ ID NO: 100391 - RNA, 20 nt, Artificial Sequence
  LRRK2 RNA guide
auuacgcaauguaaacggga

SEQ ID NO: 100392 - RNA, 20 nt, Artificial Sequence
  LRRK2 RNA guide
auuaguguuuagacuugacu

SEQ ID NO: 100393 - RNA, 20 nt, Artificial Sequence
  LRRK2 RNA guide
auuaugaauaguuuggaaaa

SEQ ID NO: 100394 - RNA, 20 nt, Artificial Sequence
  LRRK2 RNA guide
auuauuccccuuuuccaaac

SEQ ID NO: 100395 - RNA, 20 nt, Artificial Sequence
  LRRK2 RNA guide
auucauaaucuucucaucua

SEQ ID NO: 100396 - RNA, 20 nt, Artificial Sequence
  LRRK2 RNA guide
auucaucuugccaauaacga

SEQ ID NO: 100397 - RNA, 20 nt, Artificial Sequence
  LRRK2 RNA guide
auuccaaguaucuucccaau

SEQ ID NO: 100398 - RNA, 20 nt, Artificial Sequence
  LRRK2 RNA guide
auucccaaaauuuggcuuga

SEQ ID NO: 100399 - RNA, 20 nt, Artificial Sequence
  LRRK2 RNA guide
auucccaucuuaaaaucaca

SEQ ID NO: 100400 - RNA, 20 nt, Artificial Sequence
  LRRK2 RNA guide
auuccccuuuuccaaacuau

SEQ ID NO: 100401 - RNA, 20 nt, Artificial Sequence
  LRRK2 RNA guide
auucucccuucuguuuggaa

SEQ ID NO: 100402 - RNA, 20 nt, Artificial Sequence
  LRRK2 RNA guide
auugccaguaaaacgucucc

SEQ ID NO: 100403 - RNA, 20 nt, Artificial Sequence
  LRRK2 RNA guide
auuggcaagaugaauucauu

SEQ ID NO: 100404 - RNA, 20 nt, Artificial Sequence
  LRRK2 RNA guide
auuguuuucacuucaacuca

SEQ ID NO: 100405 - RNA, 20 nt, Artificial Sequence
  LRRK2 RNA guide
auuuggcuugaggaaccucu

SEQ ID NO: 100406 - RNA, 20 nt, Artificial Sequence
  LRRK2 RNA guide
auuuugggaauaaccaagaa

SEQ ID NO: 100407 - RNA, 20 nt, Artificial Sequence
  LRRK2 RNA guide
auuuuuauccuccuucuacc

SEQ ID NO: 100408 - RNA, 20 nt, Artificial Sequence
  LRRK2 RNA guide
caaaauuuggcuugaggaac

SEQ ID NO: 100409 - RNA, 20 nt, Artificial Sequence
  LRRK2 RNA guide
caaacagaagggagaaugag

SEQ ID NO: 100410 - RNA, 20 nt, Artificial Sequence
  LRRK2 RNA guide
caaacucuuguagaguucag

SEQ ID NO: 100411 - RNA, 20 nt, Artificial Sequence
  LRRK2 RNA guide
caaagauuucuagccuuuag

SEQ ID NO: 100412 - RNA, 20 nt, Artificial Sequence
  LRRK2 RNA guide
caaauuuugggaauaaccaa

SEQ ID NO: 100413 - RNA, 20 nt, Artificial Sequence
  LRRK2 RNA guide
caacaguauggaugguggua

SEQ ID NO: 100414 - RNA, 20 nt, Artificial Sequence
  LRRK2 RNA guide
caacuaaaggcuagaaaucu

SEQ ID NO: 100415 - RNA, 20 nt, Artificial Sequence
  LRRK2 RNA guide
caacucauucucccuucugu

SEQ ID NO: 100416 - RNA, 20 nt, Artificial Sequence
  LRRK2 RNA guide
caacuuugucacuagcaaac

SEQ ID NO: 100417 - RNA, 20 nt, Artificial Sequence
  LRRK2 RNA guide
caagaacucucggcuauauu

SEQ ID NO: 100418 - RNA, 20 nt, Artificial Sequence
  LRRK2 RNA guide
caagaguuugcuagugacaa

SEQ ID NO: 100419 - RNA, 20 nt, Artificial Sequence
  LRRK2 RNA guide
caagccaaauuuugggaaua

SEQ ID NO: 100420 - RNA, 20 nt, Artificial Sequence
  LRRK2 RNA guide
caagguauacuacaacuaaa

SEQ ID NO: 100421 - RNA, 20 nt, Artificial Sequence
  LRRK2 RNA guide
caaguaucuucccaauacag

SEQ ID NO: 100422 - RNA, 20 nt, Artificial Sequence
  LRRK2 RNA guide
caauaacgagacuaaaaccg

SEQ ID NO: 100423 - RNA, 20 nt, Artificial Sequence
  LRRK2 RNA guide
caauacagagcauguccuag

SEQ ID NO: 100424 - RNA, 20 nt, Artificial Sequence
  LRRK2 RNA guide
caauauucccaucuuaaaau

SEQ ID NO: 100425 - RNA, 20 nt, Artificial Sequence
  LRRK2 RNA guide
caauguaaacgggaugaaga

SEQ ID NO: 100426 - RNA, 20 nt, Artificial Sequence
  LRRK2 RNA guide
caauguuaauauagccgaga

SEQ ID NO: 100427 - RNA, 20 nt, Artificial Sequence
  LRRK2 RNA guide
cacagucagagguuccucaa

SEQ ID NO: 100428 - RNA, 20 nt, Artificial Sequence
  LRRK2 RNA guide
cacauacuggggcucuucau

SEQ ID NO: 100429 - RNA, 20 nt, Artificial Sequence
  LRRK2 RNA guide
caccauccauacuguugguu

SEQ ID NO: 100430 - RNA, 20 nt, Artificial Sequence
  LRRK2 RNA guide
cacuaaugaauucaucuugc

SEQ ID NO: 100431 - RNA, 20 nt, Artificial Sequence
  LRRK2 RNA guide
cacuagcaaacucuuguaga

SEQ ID NO: 100432 - RNA, 20 nt, Artificial Sequence
  LRRK2 RNA guide
cacuauuaauuauuccccuu

SEQ ID NO: 100433 - RNA, 20 nt, Artificial Sequence
  LRRK2 RNA guide
cacucagggaacacauacug

SEQ ID NO: 100434 - RNA, 20 nt, Artificial Sequence
  LRRK2 RNA guide
cacuucaacucauucucccu

SEQ ID NO: 100435 - RNA, 20 nt, Artificial Sequence
  LRRK2 RNA guide
cagaagggagaaugaguuga

SEQ ID NO: 100436 - RNA, 20 nt, Artificial Sequence
  LRRK2 RNA guide
cagagcauguccuagaugag

SEQ ID NO: 100437 - RNA, 20 nt, Artificial Sequence
  LRRK2 RNA guide
cagagguuccucaagccaaa

SEQ ID NO: 100438 - RNA, 20 nt, Artificial Sequence
  LRRK2 RNA guide
cagggaacacauacuggggc

SEQ ID NO: 100439 - RNA, 20 nt, Artificial Sequence
  LRRK2 RNA guide
caguaaaacgucuccuucca

SEQ ID NO: 100440 - RNA, 20 nt, Artificial Sequence
  LRRK2 RNA guide
caguauggauggugguagaa

SEQ ID NO: 100441 - RNA, 20 nt, Artificial Sequence
  LRRK2 RNA guide
caguauguguucccugagug

SEQ ID NO: 100442 - RNA, 20 nt, Artificial Sequence
  LRRK2 RNA guide
cagucagagguuccucaagc

SEQ ID NO: 100443 - RNA, 20 nt, Artificial Sequence
  LRRK2 RNA guide
cauaaucuucucaucuagga

SEQ ID NO: 100444 - RNA, 20 nt, Artificial Sequence
  LRRK2 RNA guide
cauacuggggcucuucaucc

SEQ ID NO: 100445 - RNA, 20 nt, Artificial Sequence
  LRRK2 RNA guide
cauccauacuguugguuuua

SEQ ID NO: 100446 - RNA, 20 nt, Artificial Sequence
  LRRK2 RNA guide
caucccguuuacauugcgua

SEQ ID NO: 100447 - RNA, 20 nt, Artificial Sequence
  LRRK2 RNA guide
caucuaggacaugcucugua

SEQ ID NO: 100448 - RNA, 20 nt, Artificial Sequence
  LRRK2 RNA guide
caucuuaaaaucacagucag

SEQ ID NO: 100449 - RNA, 20 nt, Artificial Sequence
  LRRK2 RNA guide
caucuugccaauaacgagac

SEQ ID NO: 100450 - RNA, 20 nt, Artificial Sequence
  LRRK2 RNA guide
caugcucuguauugggaaga

SEQ ID NO: 100451 - RNA, 20 nt, Artificial Sequence
  LRRK2 RNA guide
cauguccuagaugagaagau

SEQ ID NO: 100452 - RNA, 20 nt, Artificial Sequence
  LRRK2 RNA guide
cauuacgcaauguaaacggg

SEQ ID NO: 100453 - RNA, 20 nt, Artificial Sequence
  LRRK2 RNA guide
cauuaguguuuagacuugac

SEQ ID NO: 100454 - RNA, 20 nt, Artificial Sequence
  LRRK2 RNA guide
cauucucccuucuguuugga

SEQ ID NO: 100455 - RNA, 20 nt, Artificial Sequence
  LRRK2 RNA guide
cauugccaguaaaacgucuc

SEQ ID NO: 100456 - RNA, 20 nt, Artificial Sequence
  LRRK2 RNA guide
cauuguuuucacuucaacuc

SEQ ID NO: 100457 - RNA, 20 nt, Artificial Sequence
  LRRK2 RNA guide
cauuuuuauccuccuucuac

SEQ ID NO: 100458 - RNA, 20 nt, Artificial Sequence
  LRRK2 RNA guide
ccaaaauuuggcuugaggaa

SEQ ID NO: 100459 - RNA, 20 nt, Artificial Sequence
  LRRK2 RNA guide
ccaaacagaagggagaauga

SEQ ID NO: 100460 - RNA, 20 nt, Artificial Sequence
  LRRK2 RNA guide
ccaaacuauucauaaucuuc

SEQ ID NO: 100461 - RNA, 20 nt, Artificial Sequence
  LRRK2 RNA guide
ccaaauuuugggaauaacca

SEQ ID NO: 100462 - RNA, 20 nt, Artificial Sequence
  LRRK2 RNA guide
ccaacaguauggaugguggu

SEQ ID NO: 100463 - RNA, 20 nt, Artificial Sequence
  LRRK2 RNA guide
ccaagaacucucggcuauau

SEQ ID NO: 100464 - RNA, 20 nt, Artificial Sequence
  LRRK2 RNA guide
ccaaguaucuucccaauaca

SEQ ID NO: 100465 - RNA, 20 nt, Artificial Sequence
  LRRK2 RNA guide
ccaauaacgagacuaaaacc

SEQ ID NO: 100466 - RNA, 20 nt, Artificial Sequence
  LRRK2 RNA guide
ccaauacagagcauguccua

SEQ ID NO: 100467 - RNA, 20 nt, Artificial Sequence
  LRRK2 RNA guide
ccaccauccauacuguuggu

SEQ ID NO: 100468 - RNA, 20 nt, Artificial Sequence
  LRRK2 RNA guide
ccaguaaaacgucuccuucc

SEQ ID NO: 100469 - RNA, 20 nt, Artificial Sequence
  LRRK2 RNA guide
ccaguauguguucccugagu

SEQ ID NO: 100470 - RNA, 20 nt, Artificial Sequence
  LRRK2 RNA guide
ccauccauacuguugguuuu

SEQ ID NO: 100471 - RNA, 20 nt, Artificial Sequence
  LRRK2 RNA guide
ccaucuuaaaaucacaguca

SEQ ID NO: 100472 - RNA, 20 nt, Artificial Sequence
  LRRK2 RNA guide
ccauuuuuauccuccuucua

SEQ ID NO: 100473 - RNA, 20 nt, Artificial Sequence
  LRRK2 RNA guide
cccaaaauuuggcuugagga

SEQ ID NO: 100474 - RNA, 20 nt, Artificial Sequence
  LRRK2 RNA guide
cccaauacagagcauguccu

SEQ ID NO: 100475 - RNA, 20 nt, Artificial Sequence
  LRRK2 RNA guide
cccaguauguguucccugag

SEQ ID NO: 100476 - RNA, 20 nt, Artificial Sequence
  LRRK2 RNA guide
cccaucuuaaaaucacaguc

SEQ ID NO: 100477 - RNA, 20 nt, Artificial Sequence
  LRRK2 RNA guide
cccauuuuuauccuccuucu

SEQ ID NO: 100478 - RNA, 20 nt, Artificial Sequence
  LRRK2 RNA guide
ccccaguauguguucccuga

SEQ ID NO: 100479 - RNA, 20 nt, Artificial Sequence
  LRRK2 RNA guide
ccccuuuuccaaacuauuca

SEQ ID NO: 100480 - RNA, 20 nt, Artificial Sequence
  LRRK2 RNA guide
cccguuuacauugcguaaug

SEQ ID NO: 100481 - RNA, 20 nt, Artificial Sequence
  LRRK2 RNA guide
cccugagugucuuuaagaag

SEQ ID NO: 100482 - RNA, 20 nt, Artificial Sequence
  LRRK2 RNA guide
cccuucuguuuggaaggaga

SEQ ID NO: 100483 - RNA, 20 nt, Artificial Sequence
  LRRK2 RNA guide
ccgaacccauuuuuauccuc

SEQ ID NO: 100484 - RNA, 20 nt, Artificial Sequence
  LRRK2 RNA guide
ccgagaguucuugguuauuc

SEQ ID NO: 100485 - RNA, 20 nt, Artificial Sequence
  LRRK2 RNA guide
ccguuuacauugcguaauga

SEQ ID NO: 100486 - RNA, 20 nt, Artificial Sequence
  LRRK2 RNA guide
ccuagaugagaagauuauga

SEQ ID NO: 100487 - RNA, 20 nt, Artificial Sequence
  LRRK2 RNA guide
ccucaagccaaauuuuggga

SEQ ID NO: 100488 - RNA, 20 nt, Artificial Sequence
  LRRK2 RNA guide
ccuccuucuaccaccaucca

SEQ ID NO: 100489 - RNA, 20 nt, Artificial Sequence
  LRRK2 RNA guide
ccucugacugugauuuuaag

SEQ ID NO: 100490 - RNA, 20 nt, Artificial Sequence
  LRRK2 RNA guide
ccugagugucuuuaagaagu

SEQ ID NO: 100491 - RNA, 20 nt, Artificial Sequence
  LRRK2 RNA guide
ccuuccaaacagaagggaga

SEQ ID NO: 100492 - RNA, 20 nt, Artificial Sequence
  LRRK2 RNA guide
ccuucuaccaccauccauac

SEQ ID NO: 100493 - RNA, 20 nt, Artificial Sequence
  LRRK2 RNA guide
ccuucuguuuggaaggagac

SEQ ID NO: 100494 - RNA, 20 nt, Artificial Sequence
  LRRK2 RNA guide
cgaacccauuuuuauccucc

SEQ ID NO: 100495 - RNA, 20 nt, Artificial Sequence
  LRRK2 RNA guide
cgagacuaaaaccgaaccca

SEQ ID NO: 100496 - RNA, 20 nt, Artificial Sequence
  LRRK2 RNA guide
cgagaguucuugguuauucc

SEQ ID NO: 100497 - RNA, 20 nt, Artificial Sequence
  LRRK2 RNA guide
cgcaauguaaacgggaugaa

SEQ ID NO: 100498 - RNA, 20 nt, Artificial Sequence
  LRRK2 RNA guide
cggcuauauuaacauugcca

SEQ ID NO: 100499 - RNA, 20 nt, Artificial Sequence
  LRRK2 RNA guide
cgggaugaagagccccagua

SEQ ID NO: 100500 - RNA, 20 nt, Artificial Sequence
  LRRK2 RNA guide
cgguuuuagucucguuauug

SEQ ID NO: 100501 - RNA, 20 nt, Artificial Sequence
  LRRK2 RNA guide
cgucuccuuccaaacagaag

SEQ ID NO: 100502 - RNA, 20 nt, Artificial Sequence
  LRRK2 RNA guide
cguuauuggcaagaugaauu

SEQ ID NO: 100503 - RNA, 20 nt, Artificial Sequence
  LRRK2 RNA guide
cguuuacauugcguaaugau

SEQ ID NO: 100504 - RNA, 20 nt, Artificial Sequence
  LRRK2 RNA guide
cguuuuacuggcaauguuaa

SEQ ID NO: 100505 - RNA, 20 nt, Artificial Sequence
  LRRK2 RNA guide
cuaaaaccgaacccauuuuu

SEQ ID NO: 100506 - RNA, 20 nt, Artificial Sequence
  LRRK2 RNA guide
cuaaacacuaaugaauucau

SEQ ID NO: 100507 - RNA, 20 nt, Artificial Sequence
  LRRK2 RNA guide
cuaaugaauucaucuugcca

SEQ ID NO: 100508 - RNA, 20 nt, Artificial Sequence
  LRRK2 RNA guide
cuacaacuaaaggcuagaaa

SEQ ID NO: 100509 - RNA, 20 nt, Artificial Sequence
  LRRK2 RNA guide
cuacaagaguuugcuaguga

SEQ ID NO: 100510 - RNA, 20 nt, Artificial Sequence
  LRRK2 RNA guide
cuaccaccauccauacuguu

SEQ ID NO: 100511 - RNA, 20 nt, Artificial Sequence
  LRRK2 RNA guide
cuagcaaacucuuguagagu

SEQ ID NO: 100512 - RNA, 20 nt, Artificial Sequence
  LRRK2 RNA guide
cuagccuuuaguuguaguau

SEQ ID NO: 100513 - RNA, 20 nt, Artificial Sequence
  LRRK2 RNA guide
cuaggacaugcucuguauug

SEQ ID NO: 100514 - RNA, 20 nt, Artificial Sequence
  LRRK2 RNA guide
cuagugacaaaguugcauuu

SEQ ID NO: 100515 - RNA, 20 nt, Artificial Sequence
  LRRK2 RNA guide
cuauauuaacauugccagua

SEQ ID NO: 100516 - RNA, 20 nt, Artificial Sequence
  LRRK2 RNA guide
cuauucauaaucuucucauc

SEQ ID NO: 100517 - RNA, 20 nt, Artificial Sequence
  LRRK2 RNA guide
cuauuccaaguaucuuccca

SEQ ID NO: 100518 - RNA, 20 nt, Artificial Sequence
  LRRK2 RNA guide
cucaagccaaauuuugggaa

SEQ ID NO: 100519 - RNA, 20 nt, Artificial Sequence
  LRRK2 RNA guide
cucagggaacacauacuggg

SEQ ID NO: 100520 - RNA, 20 nt, Artificial Sequence
  LRRK2 RNA guide
cucaucuaggacaugcucug

SEQ ID NO: 100521 - RNA, 20 nt, Artificial Sequence
  LRRK2 RNA guide
cucauucucccuucuguuug

SEQ ID NO: 100522 - RNA, 20 nt, Artificial Sequence
  LRRK2 RNA guide
cucccuucuguuuggaagga

SEQ ID NO: 100523 - RNA, 20 nt, Artificial Sequence
  LRRK2 RNA guide
cuccuuccaaacagaaggga

SEQ ID NO: 100524 - RNA, 20 nt, Artificial Sequence
  LRRK2 RNA guide
cuccuucuaccaccauccau

SEQ ID NO: 100525 - RNA, 20 nt, Artificial Sequence
  LRRK2 RNA guide
cucggcuauauuaacauugc

SEQ ID NO: 100526 - RNA, 20 nt, Artificial Sequence
  LRRK2 RNA guide
cucguuauuggcaagaugaa

SEQ ID NO: 100527 - RNA, 20 nt, Artificial Sequence
  LRRK2 RNA guide
cucuacaagaguuugcuagu

SEQ ID NO: 100528 - RNA, 20 nt, Artificial Sequence
  LRRK2 RNA guide
cucucggcuauauuaacauu

SEQ ID NO: 100529 - RNA, 20 nt, Artificial Sequence
  LRRK2 RNA guide
cucugacugugauuuuaaga

SEQ ID NO: 100530 - RNA, 20 nt, Artificial Sequence
  LRRK2 RNA guide
cucuguauugggaagauacu

SEQ ID NO: 100531 - RNA, 20 nt, Artificial Sequence
  LRRK2 RNA guide
cucuucaucccguuuacauu

SEQ ID NO: 100532 - RNA, 20 nt, Artificial Sequence
  LRRK2 RNA guide
cucuuguagaguucagcacu

SEQ ID NO: 100533 - RNA, 20 nt, Artificial Sequence
  LRRK2 RNA guide
cugaacucuacaagaguuug

SEQ ID NO: 100534 - RNA, 20 nt, Artificial Sequence
  LRRK2 RNA guide
cugacugugauuuuaagaug

SEQ ID NO: 100535 - RNA, 20 nt, Artificial Sequence
  LRRK2 RNA guide
cugagugucuuuaagaagua

SEQ ID NO: 100536 - RNA, 20 nt, Artificial Sequence
  LRRK2 RNA guide
cuggcaauguuaauauagcc

SEQ ID NO: 100537 - RNA, 20 nt, Artificial Sequence
  LRRK2 RNA guide
cuggggcucuucaucccguu

SEQ ID NO: 100538 - RNA, 20 nt, Artificial Sequence
  LRRK2 RNA guide
cuguauugggaagauacuug

SEQ ID NO: 100539 - RNA, 20 nt, Artificial Sequence
  LRRK2 RNA guide
cugugauuuuaagaugggaa

SEQ ID NO: 100540 - RNA, 20 nt, Artificial Sequence
  LRRK2 RNA guide
cuguuuggaaggagacguuu

SEQ ID NO: 100541 - RNA, 20 nt, Artificial Sequence
  LRRK2 RNA guide
cuuaaaaucacagucagagg

SEQ ID NO: 100542 - RNA, 20 nt, Artificial Sequence
  LRRK2 RNA guide
cuuaaagacacucagggaac

SEQ ID NO: 100543 - RNA, 20 nt, Artificial Sequence
  LRRK2 RNA guide
cuucaacucauucucccuuc

SEQ ID NO: 100544 - RNA, 20 nt, Artificial Sequence
  LRRK2 RNA guide
cuucaucccguuuacauugc

SEQ ID NO: 100545 - RNA, 20 nt, Artificial Sequence
  LRRK2 RNA guide
cuuccaaacagaagggagaa

SEQ ID NO: 100546 - RNA, 20 nt, Artificial Sequence
  LRRK2 RNA guide
cuucccaauacagagcaugu

SEQ ID NO: 100547 - RNA, 20 nt, Artificial Sequence
  LRRK2 RNA guide
cuucuaccaccauccauacu

SEQ ID NO: 100548 - RNA, 20 nt, Artificial Sequence
  LRRK2 RNA guide
cuucucaucuaggacaugcu

SEQ ID NO: 100549 - RNA, 20 nt, Artificial Sequence
  LRRK2 RNA guide
cuucuguuuggaaggagacg

SEQ ID NO: 100550 - RNA, 20 nt, Artificial Sequence
  LRRK2 RNA guide
cuucuuaaagacacucaggg

SEQ ID NO: 100551 - RNA, 20 nt, Artificial Sequence
  LRRK2 RNA guide
cuugacuauuccaaguaucu

SEQ ID NO: 100552 - RNA, 20 nt, Artificial Sequence
  LRRK2 RNA guide
cuugaggaaccucugacugu

SEQ ID NO: 100553 - RNA, 20 nt, Artificial Sequence
  LRRK2 RNA guide
cuugccaauaacgagacuaa

SEQ ID NO: 100554 - RNA, 20 nt, Artificial Sequence
  LRRK2 RNA guide
cuuggaauagucaagucuaa

SEQ ID NO: 100555 - RNA, 20 nt, Artificial Sequence
  LRRK2 RNA guide
cuugguuauucccaaaauuu

SEQ ID NO: 100556 - RNA, 20 nt, Artificial Sequence
  LRRK2 RNA guide
cuuguagaguucagcacuuu

SEQ ID NO: 100557 - RNA, 20 nt, Artificial Sequence
  LRRK2 RNA guide
cuuuauaaaaccaacaguau

SEQ ID NO: 100558 - RNA, 20 nt, Artificial Sequence
  LRRK2 RNA guide
cuuugucacuagcaaacucu

SEQ ID NO: 100559 - RNA, 20 nt, Artificial Sequence
  LRRK2 RNA guide
gaacacauacuggggcucuu

SEQ ID NO: 100560 - RNA, 20 nt, Artificial Sequence
  LRRK2 RNA guide
gaacccauuuuuauccuccu

SEQ ID NO: 100561 - RNA, 20 nt, Artificial Sequence
  LRRK2 RNA guide
gaaccucugacugugauuuu

SEQ ID NO: 100562 - RNA, 20 nt, Artificial Sequence
  LRRK2 RNA guide
gaacucuacaagaguuugcu

SEQ ID NO: 100563 - RNA, 20 nt, Artificial Sequence
  LRRK2 RNA guide
gaacucucggcuauauuaac

SEQ ID NO: 100564 - RNA, 20 nt, Artificial Sequence
  LRRK2 RNA guide
gaagagccccaguauguguu

SEQ ID NO: 100565 - RNA, 20 nt, Artificial Sequence
  LRRK2 RNA guide
gaagauacuuggaauaguca

SEQ ID NO: 100566 - RNA, 20 nt, Artificial Sequence
  LRRK2 RNA guide
gaaggagacguuuuacuggc

SEQ ID NO: 100567 - RNA, 20 nt, Artificial Sequence
  LRRK2 RNA guide
gaaggaggauaaaaaugggu

SEQ ID NO: 100568 - RNA, 20 nt, Artificial Sequence
  LRRK2 RNA guide
gaagggagaaugaguugaag

SEQ ID NO: 100569 - RNA, 20 nt, Artificial Sequence
  LRRK2 RNA guide
gaauaaccaagaacucucgg

SEQ ID NO: 100570 - RNA, 20 nt, Artificial Sequence
  LRRK2 RNA guide
gaauagucaagucuaaacac

SEQ ID NO: 100571 - RNA, 20 nt, Artificial Sequence
  LRRK2 RNA guide
gaauaguuuggaaaagggga

SEQ ID NO: 100572 - RNA, 20 nt, Artificial Sequence
  LRRK2 RNA guide
gaauucaucuugccaauaac

SEQ ID NO: 100573 - RNA, 20 nt, Artificial Sequence
  LRRK2 RNA guide
gaauucauuaguguuuagac

SEQ ID NO: 100574 - RNA, 20 nt, Artificial Sequence
  LRRK2 RNA guide
gacacucagggaacacauac

SEQ ID NO: 100575 - RNA, 20 nt, Artificial Sequence
  LRRK2 RNA guide
gacaugcucuguauugggaa

SEQ ID NO: 100576 - RNA, 20 nt, Artificial Sequence
  LRRK2 RNA guide
gacguuuuacuggcaauguu

SEQ ID NO: 100577 - RNA, 20 nt, Artificial Sequence
  LRRK2 RNA guide
gacuaaaaccgaacccauuu

SEQ ID NO: 100578 - RNA, 20 nt, Artificial Sequence
  LRRK2 RNA guide
gacuauuccaaguaucuucc

SEQ ID NO: 100579 - RNA, 20 nt, Artificial Sequence
  LRRK2 RNA guide
gacugugauuuuaagauggg

SEQ ID NO: 100580 - RNA, 20 nt, Artificial Sequence
  LRRK2 RNA guide
gacuugacuauuccaaguau

SEQ ID NO: 100581 - RNA, 20 nt, Artificial Sequence
  LRRK2 RNA guide
gagaaugaguugaagugaaa

SEQ ID NO: 100582 - RNA, 20 nt, Artificial Sequence
  LRRK2 RNA guide
gagacguuuuacuggcaaug

SEQ ID NO: 100583 - RNA, 20 nt, Artificial Sequence
  LRRK2 RNA guide
gagacuaaaaccgaacccau

SEQ ID NO: 100584 - RNA, 20 nt, Artificial Sequence
  LRRK2 RNA guide
gagaguucuugguuauuccc

SEQ ID NO: 100585 - RNA, 20 nt, Artificial Sequence
  LRRK2 RNA guide
gagcauguccuagaugagaa

SEQ ID NO: 100586 - RNA, 20 nt, Artificial Sequence
  LRRK2 RNA guide
gagccccaguauguguuccc

SEQ ID NO: 100587 - RNA, 20 nt, Artificial Sequence
  LRRK2 RNA guide
gaggaaccucugacugugau

SEQ ID NO: 100588 - RNA, 20 nt, Artificial Sequence
  LRRK2 RNA guide
gaggauaaaaauggguucgg

SEQ ID NO: 100589 - RNA, 20 nt, Artificial Sequence
  LRRK2 RNA guide
gagguuccucaagccaaauu

SEQ ID NO: 100590 - RNA, 20 nt, Artificial Sequence
  LRRK2 RNA guide
gaguucuugguuauucccaa

SEQ ID NO: 100591 - RNA, 20 nt, Artificial Sequence
  LRRK2 RNA guide
gaguugaagugaaaacaaug

SEQ ID NO: 100592 - RNA, 20 nt, Artificial Sequence
  LRRK2 RNA guide
gaguuugcuagugacaaagu

SEQ ID NO: 100593 - RNA, 20 nt, Artificial Sequence
  LRRK2 RNA guide
gauaaaaauggguucgguuu

SEQ ID NO: 100594 - RNA, 20 nt, Artificial Sequence
  LRRK2 RNA guide
gauaaaaugcaacuuuguca

SEQ ID NO: 100595 - RNA, 20 nt, Artificial Sequence
  LRRK2 RNA guide
gauacuuggaauagucaagu

SEQ ID NO: 100596 - RNA, 20 nt, Artificial Sequence
  LRRK2 RNA guide
gaugaagagccccaguaugu

SEQ ID NO: 100597 - RNA, 20 nt, Artificial Sequence
  LRRK2 RNA guide
gaugagaagauuaugaauag

SEQ ID NO: 100598 - RNA, 20 nt, Artificial Sequence
  LRRK2 RNA guide
gauggugguagaaggaggau

SEQ ID NO: 100599 - RNA, 20 nt, Artificial Sequence
  LRRK2 RNA guide
gauuaugaauaguuuggaaa

SEQ ID NO: 100600 - RNA, 20 nt, Artificial Sequence
  LRRK2 RNA guide
gauuucuagccuuuaguugu

SEQ ID NO: 100601 - RNA, 20 nt, Artificial Sequence
  LRRK2 RNA guide
gcaaacucuuguagaguuca

SEQ ID NO: 100602 - RNA, 20 nt, Artificial Sequence
  LRRK2 RNA guide
gcaacuuugucacuagcaaa

SEQ ID NO: 100603 - RNA, 20 nt, Artificial Sequence
  LRRK2 RNA guide
gcaagaugaauucauuagug

SEQ ID NO: 100604 - RNA, 20 nt, Artificial Sequence
  LRRK2 RNA guide
gcaauguaaacgggaugaag

SEQ ID NO: 100605 - RNA, 20 nt, Artificial Sequence
  LRRK2 RNA guide
gcaauguuaauauagccgag

SEQ ID NO: 100606 - RNA, 20 nt, Artificial Sequence
  LRRK2 RNA guide
gcauguccuagaugagaaga

SEQ ID NO: 100607 - RNA, 20 nt, Artificial Sequence
  LRRK2 RNA guide
gcauuguuuucacuucaacu

SEQ ID NO: 100608 - RNA, 20 nt, Artificial Sequence
  LRRK2 RNA guide
gccaaauuuugggaauaacc

SEQ ID NO: 100609 - RNA, 20 nt, Artificial Sequence
  LRRK2 RNA guide
gccaauaacgagacuaaaac

SEQ ID NO: 100610 - RNA, 20 nt, Artificial Sequence
  LRRK2 RNA guide
gccaguaaaacgucuccuuc

SEQ ID NO: 100611 - RNA, 20 nt, Artificial Sequence
  LRRK2 RNA guide
gccccaguauguguucccug

SEQ ID NO: 100612 - RNA, 20 nt, Artificial Sequence
  LRRK2 RNA guide
gccgagaguucuugguuauu

SEQ ID NO: 100613 - RNA, 20 nt, Artificial Sequence
  LRRK2 RNA guide
gcguaaugauuuaacaauau

SEQ ID NO: 100614 - RNA, 20 nt, Artificial Sequence
  LRRK2 RNA guide
gcuagugacaaaguugcauu

SEQ ID NO: 100615 - RNA, 20 nt, Artificial Sequence
  LRRK2 RNA guide
gcuauauuaacauugccagu

SEQ ID NO: 100616 - RNA, 20 nt, Artificial Sequence
  LRRK2 RNA guide
gcucuguauugggaagauac

SEQ ID NO: 100617 - RNA, 20 nt, Artificial Sequence
  LRRK2 RNA guide
gcucuucaucccguuuacau

SEQ ID NO: 100618 - RNA, 20 nt, Artificial Sequence
  LRRK2 RNA guide
gcugaacucuacaagaguuu

SEQ ID NO: 100619 - RNA, 20 nt, Artificial Sequence
  LRRK2 RNA guide
gcuugaggaaccucugacug

SEQ ID NO: 100620 - RNA, 20 nt, Artificial Sequence
  LRRK2 RNA guide
ggaaaaggggaauaauuaau

SEQ ID NO: 100621 - RNA, 20 nt, Artificial Sequence
  LRRK2 RNA guide
ggaacacauacuggggcucu

SEQ ID NO: 100622 - RNA, 20 nt, Artificial Sequence
  LRRK2 RNA guide
ggaaccucugacugugauuu

SEQ ID NO: 100623 - RNA, 20 nt, Artificial Sequence
  LRRK2 RNA guide
ggaagauacuuggaauaguc

SEQ ID NO: 100624 - RNA, 20 nt, Artificial Sequence
  LRRK2 RNA guide
ggaaggagacguuuuacugg

SEQ ID NO: 100625 - RNA, 20 nt, Artificial Sequence
  LRRK2 RNA guide
ggaauaaccaagaacucucg

SEQ ID NO: 100626 - RNA, 20 nt, Artificial Sequence
  LRRK2 RNA guide
ggaauagucaagucuaaaca

SEQ ID NO: 100627 - RNA, 20 nt, Artificial Sequence
  LRRK2 RNA guide
ggacaugcucuguauuggga

SEQ ID NO: 100628 - RNA, 20 nt, Artificial Sequence
  LRRK2 RNA guide
ggagaaugaguugaagugaa

SEQ ID NO: 100629 - RNA, 20 nt, Artificial Sequence
  LRRK2 RNA guide
ggagacguuuuacuggcaau

SEQ ID NO: 100630 - RNA, 20 nt, Artificial Sequence
  LRRK2 RNA guide
ggaggauaaaaauggguucg

SEQ ID NO: 100631 - RNA, 20 nt, Artificial Sequence
  LRRK2 RNA guide
ggauaaaaauggguucgguu

SEQ ID NO: 100632 - RNA, 20 nt, Artificial Sequence
  LRRK2 RNA guide
ggaugaagagccccaguaug

SEQ ID NO: 100633 - RNA, 20 nt, Artificial Sequence
  LRRK2 RNA guide
ggauggugguagaaggagga

SEQ ID NO: 100634 - RNA, 20 nt, Artificial Sequence
  LRRK2 RNA guide
ggcaagaugaauucauuagu

SEQ ID NO: 100635 - RNA, 20 nt, Artificial Sequence
  LRRK2 RNA guide
ggcaauguuaauauagccga

SEQ ID NO: 100636 - RNA, 20 nt, Artificial Sequence
  LRRK2 RNA guide
ggcauuguuuucacuucaac

SEQ ID NO: 100637 - RNA, 20 nt, Artificial Sequence
  LRRK2 RNA guide
ggcuauauuaacauugccag

SEQ ID NO: 100638 - RNA, 20 nt, Artificial Sequence
  LRRK2 RNA guide
ggcucuucaucccguuuaca

SEQ ID NO: 100639 - RNA, 20 nt, Artificial Sequence
  LRRK2 RNA guide
ggcuugaggaaccucugacu

SEQ ID NO: 100640 - RNA, 20 nt, Artificial Sequence
  LRRK2 RNA guide
gggaacacauacuggggcuc

SEQ ID NO: 100641 - RNA, 20 nt, Artificial Sequence
  LRRK2 RNA guide
gggaagauacuuggaauagu

SEQ ID NO: 100642 - RNA, 20 nt, Artificial Sequence
  LRRK2 RNA guide
gggaauaaccaagaacucuc

SEQ ID NO: 100643 - RNA, 20 nt, Artificial Sequence
  LRRK2 RNA guide
gggaauauuguuaaaucauu

SEQ ID NO: 100644 - RNA, 20 nt, Artificial Sequence
  LRRK2 RNA guide
gggagaaugaguugaaguga

SEQ ID NO: 100645 - RNA, 20 nt, Artificial Sequence
  LRRK2 RNA guide
gggaugaagagccccaguau

SEQ ID NO: 100646 - RNA, 20 nt, Artificial Sequence
  LRRK2 RNA guide
gggcucuucaucccguuuac

SEQ ID NO: 100647 - RNA, 20 nt, Artificial Sequence
  LRRK2 RNA guide
ggggcucuucaucccguuua

SEQ ID NO: 100648 - RNA, 20 nt, Artificial Sequence
  LRRK2 RNA guide
ggguucgguuuuagucucgu

SEQ ID NO: 100649 - RNA, 20 nt, Artificial Sequence
  LRRK2 RNA guide
gguagaaggaggauaaaaau

SEQ ID NO: 100650 - RNA, 20 nt, Artificial Sequence
  LRRK2 RNA guide
ggugguagaaggaggauaaa

SEQ ID NO: 100651 - RNA, 20 nt, Artificial Sequence
  LRRK2 RNA guide
gguuauucccaaaauuuggc

SEQ ID NO: 100652 - RNA, 20 nt, Artificial Sequence
  LRRK2 RNA guide
gguuccucaagccaaauuuu

SEQ ID NO: 100653 - RNA, 20 nt, Artificial Sequence
  LRRK2 RNA guide
gguucgguuuuagucucguu

SEQ ID NO: 100654 - RNA, 20 nt, Artificial Sequence
  LRRK2 RNA guide
gguuuuagucucguuauugg

SEQ ID NO: 100655 - RNA, 20 nt, Artificial Sequence
  LRRK2 RNA guide
guaaaacgucuccuuccaaa

SEQ ID NO: 100656 - RNA, 20 nt, Artificial Sequence
  LRRK2 RNA guide
guaaacgggaugaagagccc

SEQ ID NO: 100657 - RNA, 20 nt, Artificial Sequence
  LRRK2 RNA guide
guaaaggcauuguuuucacu

SEQ ID NO: 100658 - RNA, 20 nt, Artificial Sequence
  LRRK2 RNA guide
guagaaggaggauaaaaaug

SEQ ID NO: 100659 - RNA, 20 nt, Artificial Sequence
  LRRK2 RNA guide
guauacuacaacuaaaggcu

SEQ ID NO: 100660 - RNA, 20 nt, Artificial Sequence
  LRRK2 RNA guide
guaucuucccaauacagagc

SEQ ID NO: 100661 - RNA, 20 nt, Artificial Sequence
  LRRK2 RNA guide
guauggauggugguagaagg

SEQ ID NO: 100662 - RNA, 20 nt, Artificial Sequence
  LRRK2 RNA guide
guauguguucccugaguguc

SEQ ID NO: 100663 - RNA, 20 nt, Artificial Sequence
  LRRK2 RNA guide
guauugggaagauacuugga

SEQ ID NO: 100664 - RNA, 20 nt, Artificial Sequence
  LRRK2 RNA guide
gucaagucuaaacacuaaug

SEQ ID NO: 100665 - RNA, 20 nt, Artificial Sequence
  LRRK2 RNA guide
gucacuagcaaacucuugua

SEQ ID NO: 100666 - RNA, 20 nt, Artificial Sequence
  LRRK2 RNA guide
gucagagguuccucaagcca

SEQ ID NO: 100667 - RNA, 20 nt, Artificial Sequence
  LRRK2 RNA guide
guccuagaugagaagauuau

SEQ ID NO: 100668 - RNA, 20 nt, Artificial Sequence
  LRRK2 RNA guide
gucuccuuccaaacagaagg

SEQ ID NO: 100669 - RNA, 20 nt, Artificial Sequence
  LRRK2 RNA guide
gucucguuauuggcaagaug

SEQ ID NO: 100670 - RNA, 20 nt, Artificial Sequence
  LRRK2 RNA guide
gugauaaaaugcaacuuugu

SEQ ID NO: 100671 - RNA, 20 nt, Artificial Sequence
  LRRK2 RNA guide
gugcugaacucuacaagagu

SEQ ID NO: 100672 - RNA, 20 nt, Artificial Sequence
  LRRK2 RNA guide
gugguagaaggaggauaaaa

SEQ ID NO: 100673 - RNA, 20 nt, Artificial Sequence
  LRRK2 RNA guide
guguucccugagugucuuua

SEQ ID NO: 100674 - RNA, 20 nt, Artificial Sequence
  LRRK2 RNA guide
guguuuagacuugacuauuc

SEQ ID NO: 100675 - RNA, 20 nt, Artificial Sequence
  LRRK2 RNA guide
guuaaaucauuacgcaaugu

SEQ ID NO: 100676 - RNA, 20 nt, Artificial Sequence
  LRRK2 RNA guide
guuaauauagccgagaguuc

SEQ ID NO: 100677 - RNA, 20 nt, Artificial Sequence
  LRRK2 RNA guide
guuacuucuuaaagacacuc

SEQ ID NO: 100678 - RNA, 20 nt, Artificial Sequence
  LRRK2 RNA guide
guuauucccaaaauuuggcu

SEQ ID NO: 100679 - RNA, 20 nt, Artificial Sequence
  LRRK2 RNA guide
guuauuggcaagaugaauuc

SEQ ID NO: 100680 - RNA, 20 nt, Artificial Sequence
  LRRK2 RNA guide
guucccugagugucuuuaag

SEQ ID NO: 100681 - RNA, 20 nt, Artificial Sequence
  LRRK2 RNA guide
guuccucaagccaaauuuug

SEQ ID NO: 100682 - RNA, 20 nt, Artificial Sequence
  LRRK2 RNA guide
guucgguuuuagucucguua

SEQ ID NO: 100683 - RNA, 20 nt, Artificial Sequence
  LRRK2 RNA guide
guucuugguuauucccaaaa

SEQ ID NO: 100684 - RNA, 20 nt, Artificial Sequence
  LRRK2 RNA guide
guugaagugaaaacaaugcc

SEQ ID NO: 100685 - RNA, 20 nt, Artificial Sequence
  LRRK2 RNA guide
guuuagacuugacuauucca

SEQ ID NO: 100686 - RNA, 20 nt, Artificial Sequence
  LRRK2 RNA guide
guuugcuagugacaaaguug

SEQ ID NO: 100687 - RNA, 20 nt, Artificial Sequence
  LRRK2 RNA guide
guuuggaaggagacguuuua

SEQ ID NO: 100688 - RNA, 20 nt, Artificial Sequence
  LRRK2 RNA guide
guuuuacuggcaauguuaau

SEQ ID NO: 100689 - RNA, 20 nt, Artificial Sequence
  LRRK2 RNA guide
guuuuagucucguuauuggc

SEQ ID NO: 100690 - RNA, 20 nt, Artificial Sequence
  LRRK2 RNA guide
guuuucacuucaacucauuc

SEQ ID NO: 100691 - RNA, 20 nt, Artificial Sequence
  LRRK2 RNA guide
uaaaaagugcugaacucuac

SEQ ID NO: 100692 - RNA, 20 nt, Artificial Sequence
  LRRK2 RNA guide
uaaaaauggguucgguuuua

SEQ ID NO: 100693 - RNA, 20 nt, Artificial Sequence
  LRRK2 RNA guide
uaaaaccaacaguauggaug

SEQ ID NO: 100694 - RNA, 20 nt, Artificial Sequence
  LRRK2 RNA guide
uaaaaccgaacccauuuuua

SEQ ID NO: 100695 - RNA, 20 nt, Artificial Sequence
  LRRK2 RNA guide
uaaaacgucuccuuccaaac

SEQ ID NO: 100696 - RNA, 20 nt, Artificial Sequence
  LRRK2 RNA guide
uaaaaucacagucagagguu

SEQ ID NO: 100697 - RNA, 20 nt, Artificial Sequence
  LRRK2 RNA guide
uaaaaugcaacuuugucacu

SEQ ID NO: 100698 - RNA, 20 nt, Artificial Sequence
  LRRK2 RNA guide
uaaacacuaaugaauucauc

SEQ ID NO: 100699 - RNA, 20 nt, Artificial Sequence
  LRRK2 RNA guide
uaaacgggaugaagagcccc

SEQ ID NO: 100700 - RNA, 20 nt, Artificial Sequence
  LRRK2 RNA guide
uaaagacacucagggaacac

SEQ ID NO: 100701 - RNA, 20 nt, Artificial Sequence
  LRRK2 RNA guide
uaaaggcauuguuuucacuu

SEQ ID NO: 100702 - RNA, 20 nt, Artificial Sequence
  LRRK2 RNA guide
uaaaucauuacgcaauguaa

SEQ ID NO: 100703 - RNA, 20 nt, Artificial Sequence
  LRRK2 RNA guide
uaacauugccaguaaaacgu

SEQ ID NO: 100704 - RNA, 20 nt, Artificial Sequence
  LRRK2 RNA guide
uaaccaagaacucucggcua

SEQ ID NO: 100705 - RNA, 20 nt, Artificial Sequence
  LRRK2 RNA guide
uaacgagacuaaaaccgaac

SEQ ID NO: 100706 - RNA, 20 nt, Artificial Sequence
  LRRK2 RNA guide
uaauauagccgagaguucuu

SEQ ID NO: 100707 - RNA, 20 nt, Artificial Sequence
  LRRK2 RNA guide
uaaucuucucaucuaggaca

SEQ ID NO: 100708 - RNA, 20 nt, Artificial Sequence
  LRRK2 RNA guide
uaaugaauucaucuugccaa

SEQ ID NO: 100709 - RNA, 20 nt, Artificial Sequence
  LRRK2 RNA guide
uacaacuaaaggcuagaaau

SEQ ID NO: 100710 - RNA, 20 nt, Artificial Sequence
  LRRK2 RNA guide
uacaagaguuugcuagugac

SEQ ID NO: 100711 - RNA, 20 nt, Artificial Sequence
  LRRK2 RNA guide
uacagagcauguccuagaug

SEQ ID NO: 100712 - RNA, 20 nt, Artificial Sequence
  LRRK2 RNA guide
uaccaccauccauacuguug

SEQ ID NO: 100713 - RNA, 20 nt, Artificial Sequence
  LRRK2 RNA guide
uacgcaauguaaacgggaug

SEQ ID NO: 100714 - RNA, 20 nt, Artificial Sequence
  LRRK2 RNA guide
uacuacaacuaaaggcuaga

SEQ ID NO: 100715 - RNA, 20 nt, Artificial Sequence
  LRRK2 RNA guide
uacuggcaauguuaauauag

SEQ ID NO: 100716 - RNA, 20 nt, Artificial Sequence
  LRRK2 RNA guide
uacuggggcucuucaucccg

SEQ ID NO: 100717 - RNA, 20 nt, Artificial Sequence
  LRRK2 RNA guide
uacuucuuaaagacacucag

SEQ ID NO: 100718 - RNA, 20 nt, Artificial Sequence
  LRRK2 RNA guide
uacuuggaauagucaagucu

SEQ ID NO: 100719 - RNA, 20 nt, Artificial Sequence
  LRRK2 RNA guide
uagaaggaggauaaaaaugg

SEQ ID NO: 100720 - RNA, 20 nt, Artificial Sequence
  LRRK2 RNA guide
uagacuugacuauuccaagu

SEQ ID NO: 100721 - RNA, 20 nt, Artificial Sequence
  LRRK2 RNA guide
uagcaaacucuuguagaguu

SEQ ID NO: 100722 - RNA, 20 nt, Artificial Sequence
  LRRK2 RNA guide
uagccgagaguucuugguua

SEQ ID NO: 100723 - RNA, 20 nt, Artificial Sequence
  LRRK2 RNA guide
uagccuuuaguuguaguaua

SEQ ID NO: 100724 - RNA, 20 nt, Artificial Sequence
  LRRK2 RNA guide
uaggacaugcucuguauugg

SEQ ID NO: 100725 - RNA, 20 nt, Artificial Sequence
  LRRK2 RNA guide
uagucucguuauuggcaaga

SEQ ID NO: 100726 - RNA, 20 nt, Artificial Sequence
  LRRK2 RNA guide
uagugacaaaguugcauuuu

SEQ ID NO: 100727 - RNA, 20 nt, Artificial Sequence
  LRRK2 RNA guide
uagugauaaaaugcaacuuu

SEQ ID NO: 100728 - RNA, 20 nt, Artificial Sequence
  LRRK2 RNA guide
uaguguuuagacuugacuau

SEQ ID NO: 100729 - RNA, 20 nt, Artificial Sequence
  LRRK2 RNA guide
uauaaaaccaacaguaugga

SEQ ID NO: 100730 - RNA, 20 nt, Artificial Sequence
  LRRK2 RNA guide
uauagccgagaguucuuggu

SEQ ID NO: 100731 - RNA, 20 nt, Artificial Sequence
  LRRK2 RNA guide
uauccuccuucuaccaccau

SEQ ID NO: 100732 - RNA, 20 nt, Artificial Sequence
  LRRK2 RNA guide
uaucuucccaauacagagca

SEQ ID NO: 100733 - RNA, 20 nt, Artificial Sequence
  LRRK2 RNA guide
uaugaauaguuuggaaaagg

SEQ ID NO: 100734 - RNA, 20 nt, Artificial Sequence
  LRRK2 RNA guide
uauggauggugguagaagga

SEQ ID NO: 100735 - RNA, 20 nt, Artificial Sequence
  LRRK2 RNA guide
uauguguucccugagugucu

SEQ ID NO: 100736 - RNA, 20 nt, Artificial Sequence
  LRRK2 RNA guide
uauuaacauugccaguaaaa

SEQ ID NO: 100737 - RNA, 20 nt, Artificial Sequence
  LRRK2 RNA guide
uauucauaaucuucucaucu

SEQ ID NO: 100738 - RNA, 20 nt, Artificial Sequence
  LRRK2 RNA guide
uauuccaaguaucuucccaa

SEQ ID NO: 100739 - RNA, 20 nt, Artificial Sequence
  LRRK2 RNA guide
uauucccaaaauuuggcuug

SEQ ID NO: 100740 - RNA, 20 nt, Artificial Sequence
  LRRK2 RNA guide
uauucccaucuuaaaaucac

SEQ ID NO: 100741 - RNA, 20 nt, Artificial Sequence
  LRRK2 RNA guide
uauuccccuuuuccaaacua

SEQ ID NO: 100742 - RNA, 20 nt, Artificial Sequence
  LRRK2 RNA guide
uauuggcaagaugaauucau

SEQ ID NO: 100743 - RNA, 20 nt, Artificial Sequence
  LRRK2 RNA guide
uauugggaagauacuuggaa

SEQ ID NO: 100744 - RNA, 20 nt, Artificial Sequence
  LRRK2 RNA guide
ucaaagauuucuagccuuua

SEQ ID NO: 100745 - RNA, 20 nt, Artificial Sequence
  LRRK2 RNA guide
ucaacucauucucccuucug

SEQ ID NO: 100746 - RNA, 20 nt, Artificial Sequence
  LRRK2 RNA guide
ucaagccaaauuuugggaau

SEQ ID NO: 100747 - RNA, 20 nt, Artificial Sequence
  LRRK2 RNA guide
ucacagucagagguuccuca

SEQ ID NO: 100748 - RNA, 20 nt, Artificial Sequence
  LRRK2 RNA guide
ucacuagcaaacucuuguag

SEQ ID NO: 100749 - RNA, 20 nt, Artificial Sequence
  LRRK2 RNA guide
ucacuauuaauuauuccccu

SEQ ID NO: 100750 - RNA, 20 nt, Artificial Sequence
  LRRK2 RNA guide
ucacuucaacucauucuccc

SEQ ID NO: 100751 - RNA, 20 nt, Artificial Sequence
  LRRK2 RNA guide
ucagagguuccucaagccaa

SEQ ID NO: 100752 - RNA, 20 nt, Artificial Sequence
  LRRK2 RNA guide
ucagggaacacauacugggg

SEQ ID NO: 100753 - RNA, 20 nt, Artificial Sequence
  LRRK2 RNA guide
ucauaaucuucucaucuagg

SEQ ID NO: 100754 - RNA, 20 nt, Artificial Sequence
  LRRK2 RNA guide
ucaucccguuuacauugcgu

SEQ ID NO: 100755 - RNA, 20 nt, Artificial Sequence
  LRRK2 RNA guide
ucaucuaggacaugcucugu

SEQ ID NO: 100756 - RNA, 20 nt, Artificial Sequence
  LRRK2 RNA guide
ucaucuugccaauaacgaga

SEQ ID NO: 100757 - RNA, 20 nt, Artificial Sequence
  LRRK2 RNA guide
ucauuacgcaauguaaacgg

SEQ ID NO: 100758 - RNA, 20 nt, Artificial Sequence
  LRRK2 RNA guide
ucauucucccuucuguuugg

SEQ ID NO: 100759 - RNA, 20 nt, Artificial Sequence
  LRRK2 RNA guide
uccaaacagaagggagaaug

SEQ ID NO: 100760 - RNA, 20 nt, Artificial Sequence
  LRRK2 RNA guide
uccaaguaucuucccaauac

SEQ ID NO: 100761 - RNA, 20 nt, Artificial Sequence
  LRRK2 RNA guide
ucccaaaauuuggcuugagg

SEQ ID NO: 100762 - RNA, 20 nt, Artificial Sequence
  LRRK2 RNA guide
ucccaauacagagcaugucc

SEQ ID NO: 100763 - RNA, 20 nt, Artificial Sequence
  LRRK2 RNA guide
ucccaucuuaaaaucacagu

SEQ ID NO: 100764 - RNA, 20 nt, Artificial Sequence
  LRRK2 RNA guide
uccccuuuuccaaacuauuc

SEQ ID NO: 100765 - RNA, 20 nt, Artificial Sequence
  LRRK2 RNA guide
ucccguuuacauugcguaau

SEQ ID NO: 100766 - RNA, 20 nt, Artificial Sequence
  LRRK2 RNA guide
ucccugagugucuuuaagaa

SEQ ID NO: 100767 - RNA, 20 nt, Artificial Sequence
  LRRK2 RNA guide
ucccuucuguuuggaaggag

SEQ ID NO: 100768 - RNA, 20 nt, Artificial Sequence
  LRRK2 RNA guide
uccuagaugagaagauuaug

SEQ ID NO: 100769 - RNA, 20 nt, Artificial Sequence
  LRRK2 RNA guide
uccucaagccaaauuuuggg

SEQ ID NO: 100770 - RNA, 20 nt, Artificial Sequence
  LRRK2 RNA guide
uccuccuucuaccaccaucc

SEQ ID NO: 100771 - RNA, 20 nt, Artificial Sequence
  LRRK2 RNA guide
uccuuccaaacagaagggag

SEQ ID NO: 100772 - RNA, 20 nt, Artificial Sequence
  LRRK2 RNA guide
uccuucuaccaccauccaua

SEQ ID NO: 100773 - RNA, 20 nt, Artificial Sequence
  LRRK2 RNA guide
ucggcuauauuaacauugcc

SEQ ID NO: 100774 - RNA, 20 nt, Artificial Sequence
  LRRK2 RNA guide
ucgguuuuagucucguuauu

SEQ ID NO: 100775 - RNA, 20 nt, Artificial Sequence
  LRRK2 RNA guide
ucguuauuggcaagaugaau

SEQ ID NO: 100776 - RNA, 20 nt, Artificial Sequence
  LRRK2 RNA guide
ucuaccaccauccauacugu

SEQ ID NO: 100777 - RNA, 20 nt, Artificial Sequence
  LRRK2 RNA guide
ucuagccuuuaguuguagua

SEQ ID NO: 100778 - RNA, 20 nt, Artificial Sequence
  LRRK2 RNA guide
ucuaggacaugcucuguauu

SEQ ID NO: 100779 - RNA, 20 nt, Artificial Sequence
  LRRK2 RNA guide
ucucaucuaggacaugcucu

SEQ ID NO: 100780 - RNA, 20 nt, Artificial Sequence
  LRRK2 RNA guide
ucucccuucuguuuggaagg

SEQ ID NO: 100781 - RNA, 20 nt, Artificial Sequence
  LRRK2 RNA guide
ucuccuuccaaacagaaggg

SEQ ID NO: 100782 - RNA, 20 nt, Artificial Sequence
  LRRK2 RNA guide
ucucggcuauauuaacauug

SEQ ID NO: 100783 - RNA, 20 nt, Artificial Sequence
  LRRK2 RNA guide
ucucguuauuggcaagauga

SEQ ID NO: 100784 - RNA, 20 nt, Artificial Sequence
  LRRK2 RNA guide
ucugacugugauuuuaagau

SEQ ID NO: 100785 - RNA, 20 nt, Artificial Sequence
  LRRK2 RNA guide
ucuguauugggaagauacuu

SEQ ID NO: 100786 - RNA, 20 nt, Artificial Sequence
  LRRK2 RNA guide
ucuguuuggaaggagacguu

SEQ ID NO: 100787 - RNA, 20 nt, Artificial Sequence
  LRRK2 RNA guide
ucuuaaaaucacagucagag

SEQ ID NO: 100788 - RNA, 20 nt, Artificial Sequence
  LRRK2 RNA guide
ucuuaaagacacucagggaa

SEQ ID NO: 100789 - RNA, 20 nt, Artificial Sequence
  LRRK2 RNA guide
ucuucaucccguuuacauug

SEQ ID NO: 100790 - RNA, 20 nt, Artificial Sequence
  LRRK2 RNA guide
ucuucccaauacagagcaug

SEQ ID NO: 100791 - RNA, 20 nt, Artificial Sequence
  LRRK2 RNA guide
ucuucucaucuaggacaugc

SEQ ID NO: 100792 - RNA, 20 nt, Artificial Sequence
  LRRK2 RNA guide
ucuugccaauaacgagacua

SEQ ID NO: 100793 - RNA, 20 nt, Artificial Sequence
  LRRK2 RNA guide
ucuugguuauucccaaaauu

SEQ ID NO: 100794 - RNA, 20 nt, Artificial Sequence
  LRRK2 RNA guide
ucuuguagaguucagcacuu

SEQ ID NO: 100795 - RNA, 20 nt, Artificial Sequence
  LRRK2 RNA guide
ugaacucuacaagaguuugc

SEQ ID NO: 100796 - RNA, 20 nt, Artificial Sequence
  LRRK2 RNA guide
ugaagagccccaguaugugu

SEQ ID NO: 100797 - RNA, 20 nt, Artificial Sequence
  LRRK2 RNA guide
ugaauaguuuggaaaagggg

SEQ ID NO: 100798 - RNA, 20 nt, Artificial Sequence
  LRRK2 RNA guide
ugaauucaucuugccaauaa

SEQ ID NO: 100799 - RNA, 20 nt, Artificial Sequence
  LRRK2 RNA guide
ugacuauuccaaguaucuuc

SEQ ID NO: 100800 - RNA, 20 nt, Artificial Sequence
  LRRK2 RNA guide
ugacugugauuuuaagaugg

SEQ ID NO: 100801 - RNA, 20 nt, Artificial Sequence
  LRRK2 RNA guide
ugaggaaccucugacuguga

SEQ ID NO: 100802 - RNA, 20 nt, Artificial Sequence
  LRRK2 RNA guide
ugaguugaagugaaaacaau

SEQ ID NO: 100803 - RNA, 20 nt, Artificial Sequence
  LRRK2 RNA guide
ugauaaaaugcaacuuuguc

SEQ ID NO: 100804 - RNA, 20 nt, Artificial Sequence
  LRRK2 RNA guide
ugcaacuuugucacuagcaa

SEQ ID NO: 100805 - RNA, 20 nt, Artificial Sequence
  LRRK2 RNA guide
ugccaauaacgagacuaaaa

SEQ ID NO: 100806 - RNA, 20 nt, Artificial Sequence
  LRRK2 RNA guide
ugccaguaaaacgucuccuu

SEQ ID NO: 100807 - RNA, 20 nt, Artificial Sequence
  LRRK2 RNA guide
ugcguaaugauuuaacaaua

SEQ ID NO: 100808 - RNA, 20 nt, Artificial Sequence
  LRRK2 RNA guide
ugcuagugacaaaguugcau

SEQ ID NO: 100809 - RNA, 20 nt, Artificial Sequence
  LRRK2 RNA guide
ugcucuguauugggaagaua

SEQ ID NO: 100810 - RNA, 20 nt, Artificial Sequence
  LRRK2 RNA guide
ugcugaacucuacaagaguu

SEQ ID NO: 100811 - RNA, 20 nt, Artificial Sequence
  LRRK2 RNA guide
uggaaaaggggaauaauuaa

SEQ ID NO: 100812 - RNA, 20 nt, Artificial Sequence
  LRRK2 RNA guide
uggaaggagacguuuuacug

SEQ ID NO: 100813 - RNA, 20 nt, Artificial Sequence
  LRRK2 RNA guide
uggaauagucaagucuaaac

SEQ ID NO: 100814 - RNA, 20 nt, Artificial Sequence
  LRRK2 RNA guide
uggauggugguagaaggagg

SEQ ID NO: 100815 - RNA, 20 nt, Artificial Sequence
  LRRK2 RNA guide
uggcaagaugaauucauuag

SEQ ID NO: 100816 - RNA, 20 nt, Artificial Sequence
  LRRK2 RNA guide
uggcaauguuaauauagccg

SEQ ID NO: 100817 - RNA, 20 nt, Artificial Sequence
  LRRK2 RNA guide
uggcuugaggaaccucugac

SEQ ID NO: 100818 - RNA, 20 nt, Artificial Sequence
  LRRK2 RNA guide
ugggaagauacuuggaauag

SEQ ID NO: 100819 - RNA, 20 nt, Artificial Sequence
  LRRK2 RNA guide
ugggaauaaccaagaacucu

SEQ ID NO: 100820 - RNA, 20 nt, Artificial Sequence
  LRRK2 RNA guide
ugggaauauuguuaaaucau

SEQ ID NO: 100821 - RNA, 20 nt, Artificial Sequence
  LRRK2 RNA guide
uggggcucuucaucccguuu

SEQ ID NO: 100822 - RNA, 20 nt, Artificial Sequence
  LRRK2 RNA guide
uggguucgguuuuagucucg

SEQ ID NO: 100823 - RNA, 20 nt, Artificial Sequence
  LRRK2 RNA guide
ugguagaaggaggauaaaaa

SEQ ID NO: 100824 - RNA, 20 nt, Artificial Sequence
  LRRK2 RNA guide
uggugguagaaggaggauaa

SEQ ID NO: 100825 - RNA, 20 nt, Artificial Sequence
  LRRK2 RNA guide
ugguuauucccaaaauuugg

SEQ ID NO: 100826 - RNA, 20 nt, Artificial Sequence
  LRRK2 RNA guide
uguaaacgggaugaagagcc

SEQ ID NO: 100827 - RNA, 20 nt, Artificial Sequence
  LRRK2 RNA guide
uguauugggaagauacuugg

SEQ ID NO: 100828 - RNA, 20 nt, Artificial Sequence
  LRRK2 RNA guide
ugucacuagcaaacucuugu

SEQ ID NO: 100829 - RNA, 20 nt, Artificial Sequence
  LRRK2 RNA guide
uguccuagaugagaagauua

SEQ ID NO: 100830 - RNA, 20 nt, Artificial Sequence
  LRRK2 RNA guide
uguguucccugagugucuuu

SEQ ID NO: 100831 - RNA, 20 nt, Artificial Sequence
  LRRK2 RNA guide
uguuaauauagccgagaguu

SEQ ID NO: 100832 - RNA, 20 nt, Artificial Sequence
  LRRK2 RNA guide
uguucccugagugucuuuaa

SEQ ID NO: 100833 - RNA, 20 nt, Artificial Sequence
  LRRK2 RNA guide
uguuuagacuugacuauucc

SEQ ID NO: 100834 - RNA, 20 nt, Artificial Sequence
  LRRK2 RNA guide
uguuuggaaggagacguuuu

SEQ ID NO: 100835 - RNA, 20 nt, Artificial Sequence
  LRRK2 RNA guide
uguuuucacuucaacucauu

SEQ ID NO: 100836 - RNA, 20 nt, Artificial Sequence
  LRRK2 RNA guide
uuaaaaagugcugaacucua

SEQ ID NO: 100837 - RNA, 20 nt, Artificial Sequence
  LRRK2 RNA guide
uuaaaaucacagucagaggu

SEQ ID NO: 100838 - RNA, 20 nt, Artificial Sequence
  LRRK2 RNA guide
uuaaagacacucagggaaca

SEQ ID NO: 100839 - RNA, 20 nt, Artificial Sequence
  LRRK2 RNA guide
uuaaaucauuacgcaaugua

SEQ ID NO: 100840 - RNA, 20 nt, Artificial Sequence
  LRRK2 RNA guide
uuaacauugccaguaaaacg

SEQ ID NO: 100841 - RNA, 20 nt, Artificial Sequence
  LRRK2 RNA guide
uuaauauagccgagaguucu

SEQ ID NO: 100842 - RNA, 20 nt, Artificial Sequence
  LRRK2 RNA guide
uuacgcaauguaaacgggau

SEQ ID NO: 100843 - RNA, 20 nt, Artificial Sequence
  LRRK2 RNA guide
uuacuggcaauguuaauaua

SEQ ID NO: 100844 - RNA, 20 nt, Artificial Sequence
  LRRK2 RNA guide
uuacuucuuaaagacacuca

SEQ ID NO: 100845 - RNA, 20 nt, Artificial Sequence
  LRRK2 RNA guide
uuagacuugacuauuccaag

SEQ ID NO: 100846 - RNA, 20 nt, Artificial Sequence
  LRRK2 RNA guide
uuagucucguuauuggcaag

SEQ ID NO: 100847 - RNA, 20 nt, Artificial Sequence
  LRRK2 RNA guide
uuaguguuuagacuugacua

SEQ ID NO: 100848 - RNA, 20 nt, Artificial Sequence
  LRRK2 RNA guide
uuauaaaaccaacaguaugg

SEQ ID NO: 100849 - RNA, 20 nt, Artificial Sequence
  LRRK2 RNA guide
uuauccuccuucuaccacca

SEQ ID NO: 100850 - RNA, 20 nt, Artificial Sequence
  LRRK2 RNA guide
uuaugaauaguuuggaaaag

SEQ ID NO: 100851 - RNA, 20 nt, Artificial Sequence
  LRRK2 RNA guide
uuauucccaaaauuuggcuu

SEQ ID NO: 100852 - RNA, 20 nt, Artificial Sequence
  LRRK2 RNA guide
uuauuccccuuuuccaaacu

SEQ ID NO: 100853 - RNA, 20 nt, Artificial Sequence
  LRRK2 RNA guide
uucaaagauuucuagccuuu

SEQ ID NO: 100854 - RNA, 20 nt, Artificial Sequence
  LRRK2 RNA guide
uucaacucauucucccuucu

SEQ ID NO: 100855 - RNA, 20 nt, Artificial Sequence
  LRRK2 RNA guide
uucacuucaacucauucucc

SEQ ID NO: 100856 - RNA, 20 nt, Artificial Sequence
  LRRK2 RNA guide
uucauaaucuucucaucuag

SEQ ID NO: 100857 - RNA, 20 nt, Artificial Sequence
  LRRK2 RNA guide
uucaucccguuuacauugcg

SEQ ID NO: 100858 - RNA, 20 nt, Artificial Sequence
  LRRK2 RNA guide
uucaucuugccaauaacgag

SEQ ID NO: 100859 - RNA, 20 nt, Artificial Sequence
  LRRK2 RNA guide
uuccaaacagaagggagaau

SEQ ID NO: 100860 - RNA, 20 nt, Artificial Sequence
  LRRK2 RNA guide
uuccaaguaucuucccaaua

SEQ ID NO: 100861 - RNA, 20 nt, Artificial Sequence
  LRRK2 RNA guide
uucccaaaauuuggcuugag

SEQ ID NO: 100862 - RNA, 20 nt, Artificial Sequence
  LRRK2 RNA guide
uucccaauacagagcauguc

SEQ ID NO: 100863 - RNA, 20 nt, Artificial Sequence
  LRRK2 RNA guide
uucccaucuuaaaaucacag

SEQ ID NO: 100864 - RNA, 20 nt, Artificial Sequence
  LRRK2 RNA guide
uuccccuuuuccaaacuauu

SEQ ID NO: 100865 - RNA, 20 nt, Artificial Sequence
  LRRK2 RNA guide
uucccugagugucuuuaaga

SEQ ID NO: 100866 - RNA, 20 nt, Artificial Sequence
  LRRK2 RNA guide
uuccucaagccaaauuuugg

SEQ ID NO: 100867 - RNA, 20 nt, Artificial Sequence
  LRRK2 RNA guide
uucgguuuuagucucguuau

SEQ ID NO: 100868 - RNA, 20 nt, Artificial Sequence
  LRRK2 RNA guide
uucuaccaccauccauacug

SEQ ID NO: 100869 - RNA, 20 nt, Artificial Sequence
  LRRK2 RNA guide
uucuagccuuuaguuguagu

SEQ ID NO: 100870 - RNA, 20 nt, Artificial Sequence
  LRRK2 RNA guide
uucucaucuaggacaugcuc

SEQ ID NO: 100871 - RNA, 20 nt, Artificial Sequence
  LRRK2 RNA guide
uucucccuucuguuuggaag

SEQ ID NO: 100872 - RNA, 20 nt, Artificial Sequence
  LRRK2 RNA guide
uucuguuuggaaggagacgu

SEQ ID NO: 100873 - RNA, 20 nt, Artificial Sequence
  LRRK2 RNA guide
uucuuaaagacacucaggga

SEQ ID NO: 100874 - RNA, 20 nt, Artificial Sequence
  LRRK2 RNA guide
uucuugguuauucccaaaau

SEQ ID NO: 100875 - RNA, 20 nt, Artificial Sequence
  LRRK2 RNA guide
uugacuauuccaaguaucuu

SEQ ID NO: 100876 - RNA, 20 nt, Artificial Sequence
  LRRK2 RNA guide
uugaggaaccucugacugug

SEQ ID NO: 100877 - RNA, 20 nt, Artificial Sequence
  LRRK2 RNA guide
uugccaauaacgagacuaaa

SEQ ID NO: 100878 - RNA, 20 nt, Artificial Sequence
  LRRK2 RNA guide
uugccaguaaaacgucuccu

SEQ ID NO: 100879 - RNA, 20 nt, Artificial Sequence
  LRRK2 RNA guide
uugcuagugacaaaguugca

SEQ ID NO: 100880 - RNA, 20 nt, Artificial Sequence
  LRRK2 RNA guide
uuggaaggagacguuuuacu

SEQ ID NO: 100881 - RNA, 20 nt, Artificial Sequence
  LRRK2 RNA guide
uuggaauagucaagucuaaa

SEQ ID NO: 100882 - RNA, 20 nt, Artificial Sequence
  LRRK2 RNA guide
uuggcaagaugaauucauua

SEQ ID NO: 100883 - RNA, 20 nt, Artificial Sequence
  LRRK2 RNA guide
uuggcuugaggaaccucuga

SEQ ID NO: 100884 - RNA, 20 nt, Artificial Sequence
  LRRK2 RNA guide
uugggaagauacuuggaaua

SEQ ID NO: 100885 - RNA, 20 nt, Artificial Sequence
  LRRK2 RNA guide
uugggaauaaccaagaacuc

SEQ ID NO: 100886 - RNA, 20 nt, Artificial Sequence
  LRRK2 RNA guide
uugguuauucccaaaauuug

SEQ ID NO: 100887 - RNA, 20 nt, Artificial Sequence
  LRRK2 RNA guide
uugucacuagcaaacucuug

SEQ ID NO: 100888 - RNA, 20 nt, Artificial Sequence
  LRRK2 RNA guide
uuguuuucacuucaacucau

SEQ ID NO: 100889 - RNA, 20 nt, Artificial Sequence
  LRRK2 RNA guide
uuuaaaaagugcugaacucu

SEQ ID NO: 100890 - RNA, 20 nt, Artificial Sequence
  LRRK2 RNA guide
uuuacuggcaauguuaauau

SEQ ID NO: 100891 - RNA, 20 nt, Artificial Sequence
  LRRK2 RNA guide
uuuagacuugacuauuccaa

SEQ ID NO: 100892 - RNA, 20 nt, Artificial Sequence
  LRRK2 RNA guide
uuuagucucguuauuggcaa

SEQ ID NO: 100893 - RNA, 20 nt, Artificial Sequence
  LRRK2 RNA guide
uuuauaaaaccaacaguaug

SEQ ID NO: 100894 - RNA, 20 nt, Artificial Sequence
  LRRK2 RNA guide
uuuauccuccuucuaccacc

SEQ ID NO: 100895 - RNA, 20 nt, Artificial Sequence
  LRRK2 RNA guide
uuucacuucaacucauucuc

SEQ ID NO: 100896 - RNA, 20 nt, Artificial Sequence
  LRRK2 RNA guide
uuucuagccuuuaguuguag

SEQ ID NO: 100897 - RNA, 20 nt, Artificial Sequence
  LRRK2 RNA guide
uuugcuagugacaaaguugc

SEQ ID NO: 100898 - RNA, 20 nt, Artificial Sequence
  LRRK2 RNA guide
uuuggaaggagacguuuuac

SEQ ID NO: 100899 - RNA, 20 nt, Artificial Sequence
  LRRK2 RNA guide
uuuggcuugaggaaccucug

SEQ ID NO: 100900 - RNA, 20 nt, Artificial Sequence
  LRRK2 RNA guide
uuugggaauaaccaagaacu

SEQ ID NO: 100901 - RNA, 20 nt, Artificial Sequence
  LRRK2 RNA guide
uuugucacuagcaaacucuu

SEQ ID NO: 100902 - RNA, 20 nt, Artificial Sequence
  LRRK2 RNA guide
uuuuacuggcaauguuaaua

SEQ ID NO: 100903 - RNA, 20 nt, Artificial Sequence
  LRRK2 RNA guide
uuuuagucucguuauuggca

SEQ ID NO: 100904 - RNA, 20 nt, Artificial Sequence
  LRRK2 RNA guide
uuuuauccuccuucuaccac

SEQ ID NO: 100905 - RNA, 20 nt, Artificial Sequence
  LRRK2 RNA guide
uuuucacuucaacucauucu

SEQ ID NO: 100906 - RNA, 20 nt, Artificial Sequence
  LRRK2 RNA guide
uuuugggaauaaccaagaac

SEQ ID NO: 100907 - RNA, 20 nt, Artificial Sequence
  LRRK2 RNA guide
uuuuuauccuccuucuacca

SEQ ID NO: 100908 - RNA, 21 nt, Artificial Sequence
  LRRK2 RNA guide
aaaaagugcugaacucuacaa

SEQ ID NO: 100909 - RNA, 21 nt, Artificial Sequence
  LRRK2 RNA guide
aaaaauggguucgguuuuagu

SEQ ID NO: 100910 - RNA, 21 nt, Artificial Sequence
  LRRK2 RNA guide
aaaaccaacaguauggauggu

SEQ ID NO: 100911 - RNA, 21 nt, Artificial Sequence
  LRRK2 RNA guide
aaaaccgaacccauuuuuauc

SEQ ID NO: 100912 - RNA, 21 nt, Artificial Sequence
  LRRK2 RNA guide
aaaacgucuccuuccaaacag

SEQ ID NO: 100913 - RNA, 21 nt, Artificial Sequence
  LRRK2 RNA guide
aaaagugcugaacucuacaag

SEQ ID NO: 100914 - RNA, 21 nt, Artificial Sequence
  LRRK2 RNA guide
aaaaucacagucagagguucc

SEQ ID NO: 100915 - RNA, 21 nt, Artificial Sequence
  LRRK2 RNA guide
aaaaugcaacuuugucacuag

SEQ ID NO: 100916 - RNA, 21 nt, Artificial Sequence
  LRRK2 RNA guide
aaaauggguucgguuuuaguc

SEQ ID NO: 100917 - RNA, 21 nt, Artificial Sequence
  LRRK2 RNA guide
aaaauuuggcuugaggaaccu

SEQ ID NO: 100918 - RNA, 21 nt, Artificial Sequence
  LRRK2 RNA guide
aaacacuaaugaauucaucuu

SEQ ID NO: 100919 - RNA, 21 nt, Artificial Sequence
  LRRK2 RNA guide
aaacagaagggagaaugaguu

SEQ ID NO: 100920 - RNA, 21 nt, Artificial Sequence
  LRRK2 RNA guide
aaaccaacaguauggauggug

SEQ ID NO: 100921 - RNA, 21 nt, Artificial Sequence
  LRRK2 RNA guide
aaaccgaacccauuuuuaucc

SEQ ID NO: 100922 - RNA, 21 nt, Artificial Sequence
  LRRK2 RNA guide
aaacgggaugaagagccccag

SEQ ID NO: 100923 - RNA, 21 nt, Artificial Sequence
  LRRK2 RNA guide
aaacgucuccuuccaaacaga

SEQ ID NO: 100924 - RNA, 21 nt, Artificial Sequence
  LRRK2 RNA guide
aaacucuuguagaguucagca

SEQ ID NO: 100925 - RNA, 21 nt, Artificial Sequence
  LRRK2 RNA guide
aaagacacucagggaacacau

SEQ ID NO: 100926 - RNA, 21 nt, Artificial Sequence
  LRRK2 RNA guide
aaagauuucuagccuuuaguu

SEQ ID NO: 100927 - RNA, 21 nt, Artificial Sequence
  LRRK2 RNA guide
aaaggcauuguuuucacuuca

SEQ ID NO: 100928 - RNA, 21 nt, Artificial Sequence
  LRRK2 RNA guide
aaagugcugaacucuacaaga

SEQ ID NO: 100929 - RNA, 21 nt, Artificial Sequence
  LRRK2 RNA guide
aaaguuacuucuuaaagacac

SEQ ID NO: 100930 - RNA, 21 nt, Artificial Sequence
  LRRK2 RNA guide
aaaucacagucagagguuccu

SEQ ID NO: 100931 - RNA, 21 nt, Artificial Sequence
  LRRK2 RNA guide
aaaucauuacgcaauguaaac

SEQ ID NO: 100932 - RNA, 21 nt, Artificial Sequence
  LRRK2 RNA guide
aaaugcaacuuugucacuagc

SEQ ID NO: 100933 - RNA, 21 nt, Artificial Sequence
  LRRK2 RNA guide
aaauggguucgguuuuagucu

SEQ ID NO: 100934 - RNA, 21 nt, Artificial Sequence
  LRRK2 RNA guide
aaauuuggcuugaggaaccuc

SEQ ID NO: 100935 - RNA, 21 nt, Artificial Sequence
  LRRK2 RNA guide
aaauuuugggaauaaccaaga

SEQ ID NO: 100936 - RNA, 21 nt, Artificial Sequence
  LRRK2 RNA guide
aacacauacuggggcucuuca

SEQ ID NO: 100937 - RNA, 21 nt, Artificial Sequence
  LRRK2 RNA guide
aacacuaaugaauucaucuug

SEQ ID NO: 100938 - RNA, 21 nt, Artificial Sequence
  LRRK2 RNA guide
aacagaagggagaaugaguug

SEQ ID NO: 100939 - RNA, 21 nt, Artificial Sequence
  LRRK2 RNA guide
aacaguauggauggugguaga

SEQ ID NO: 100940 - RNA, 21 nt, Artificial Sequence
  LRRK2 RNA guide
aacauugccaguaaaacgucu

SEQ ID NO: 100941 - RNA, 21 nt, Artificial Sequence
  LRRK2 RNA guide
aaccaacaguauggauggugg

SEQ ID NO: 100942 - RNA, 21 nt, Artificial Sequence
  LRRK2 RNA guide
aaccaagaacucucggcuaua

SEQ ID NO: 100943 - RNA, 21 nt, Artificial Sequence
  LRRK2 RNA guide
aacccauuuuuauccuccuuc

SEQ ID NO: 100944 - RNA, 21 nt, Artificial Sequence
  LRRK2 RNA guide
aaccgaacccauuuuuauccu

SEQ ID NO: 100945 - RNA, 21 nt, Artificial Sequence
  LRRK2 RNA guide
aaccucugacugugauuuuaa

SEQ ID NO: 100946 - RNA, 21 nt, Artificial Sequence
  LRRK2 RNA guide
aacgagacuaaaaccgaaccc

SEQ ID NO: 100947 - RNA, 21 nt, Artificial Sequence
  LRRK2 RNA guide
aacgggaugaagagccccagu

SEQ ID NO: 100948 - RNA, 21 nt, Artificial Sequence
  LRRK2 RNA guide
aacgucuccuuccaaacagaa

SEQ ID NO: 100949 - RNA, 21 nt, Artificial Sequence
  LRRK2 RNA guide
aacuauucauaaucuucucau

SEQ ID NO: 100950 - RNA, 21 nt, Artificial Sequence
  LRRK2 RNA guide
aacucauucucccuucuguuu

SEQ ID NO: 100951 - RNA, 21 nt, Artificial Sequence
  LRRK2 RNA guide
aacucuacaagaguuugcuag

SEQ ID NO: 100952 - RNA, 21 nt, Artificial Sequence
  LRRK2 RNA guide
aacucucggcuauauuaacau

SEQ ID NO: 100953 - RNA, 21 nt, Artificial Sequence
  LRRK2 RNA guide
aacucuuguagaguucagcac

SEQ ID NO: 100954 - RNA, 21 nt, Artificial Sequence
  LRRK2 RNA guide
aacuuugucacuagcaaacuc

SEQ ID NO: 100955 - RNA, 21 nt, Artificial Sequence
  LRRK2 RNA guide
aagaacucucggcuauauuaa

SEQ ID NO: 100956 - RNA, 21 nt, Artificial Sequence
  LRRK2 RNA guide
aagacacucagggaacacaua

SEQ ID NO: 100957 - RNA, 21 nt, Artificial Sequence
  LRRK2 RNA guide
aagagccccaguauguguucc

SEQ ID NO: 100958 - RNA, 21 nt, Artificial Sequence
  LRRK2 RNA guide
aagaguuugcuagugacaaag

SEQ ID NO: 100959 - RNA, 21 nt, Artificial Sequence
  LRRK2 RNA guide
aagauacuuggaauagucaag

SEQ ID NO: 100960 - RNA, 21 nt, Artificial Sequence
  LRRK2 RNA guide
aagauuaugaauaguuuggaa

SEQ ID NO: 100961 - RNA, 21 nt, Artificial Sequence
  LRRK2 RNA guide
aagauuucuagccuuuaguug

SEQ ID NO: 100962 - RNA, 21 nt, Artificial Sequence
  LRRK2 RNA guide
aagccaaauuuugggaauaac

SEQ ID NO: 100963 - RNA, 21 nt, Artificial Sequence
  LRRK2 RNA guide
aaggagacguuuuacuggcaa

SEQ ID NO: 100964 - RNA, 21 nt, Artificial Sequence
  LRRK2 RNA guide
aaggaggauaaaaauggguuc

SEQ ID NO: 100965 - RNA, 21 nt, Artificial Sequence
  LRRK2 RNA guide
aaggcauuguuuucacuucaa

SEQ ID NO: 100966 - RNA, 21 nt, Artificial Sequence
  LRRK2 RNA guide
aagggagaaugaguugaagug

SEQ ID NO: 100967 - RNA, 21 nt, Artificial Sequence
  LRRK2 RNA guide
aagguauacuacaacuaaagg

SEQ ID NO: 100968 - RNA, 21 nt, Artificial Sequence
  LRRK2 RNA guide
aaguaucuucccaauacagag

SEQ ID NO: 100969 - RNA, 21 nt, Artificial Sequence
  LRRK2 RNA guide
aagugcugaacucuacaagag

SEQ ID NO: 100970 - RNA, 21 nt, Artificial Sequence
  LRRK2 RNA guide
aaguuacuucuuaaagacacu

SEQ ID NO: 100971 - RNA, 21 nt, Artificial Sequence
  LRRK2 RNA guide
aauaaccaagaacucucggcu

SEQ ID NO: 100972 - RNA, 21 nt, Artificial Sequence
  LRRK2 RNA guide
aauaacgagacuaaaaccgaa

SEQ ID NO: 100973 - RNA, 21 nt, Artificial Sequence
  LRRK2 RNA guide
aauacagagcauguccuagau

SEQ ID NO: 100974 - RNA, 21 nt, Artificial Sequence
  LRRK2 RNA guide
aauauagccgagaguucuugg

SEQ ID NO: 100975 - RNA, 21 nt, Artificial Sequence
  LRRK2 RNA guide
aauauucccaucuuaaaauca

SEQ ID NO: 100976 - RNA, 21 nt, Artificial Sequence
  LRRK2 RNA guide
aaucacagucagagguuccuc

SEQ ID NO: 100977 - RNA, 21 nt, Artificial Sequence
  LRRK2 RNA guide
aaucauuacgcaauguaaacg

SEQ ID NO: 100978 - RNA, 21 nt, Artificial Sequence
  LRRK2 RNA guide
aaucuucucaucuaggacaug

SEQ ID NO: 100979 - RNA, 21 nt, Artificial Sequence
  LRRK2 RNA guide
aaugaauucaucuugccaaua

SEQ ID NO: 100980 - RNA, 21 nt, Artificial Sequence
  LRRK2 RNA guide
aaugaguugaagugaaaacaa

SEQ ID NO: 100981 - RNA, 21 nt, Artificial Sequence
  LRRK2 RNA guide
aaugcaacuuugucacuagca

SEQ ID NO: 100982 - RNA, 21 nt, Artificial Sequence
  LRRK2 RNA guide
aauggguucgguuuuagucuc

SEQ ID NO: 100983 - RNA, 21 nt, Artificial Sequence
  LRRK2 RNA guide
aauguaaacgggaugaagagc

SEQ ID NO: 100984 - RNA, 21 nt, Artificial Sequence
  LRRK2 RNA guide
aauguuaauauagccgagagu

SEQ ID NO: 100985 - RNA, 21 nt, Artificial Sequence
  LRRK2 RNA guide
aauuauuccccuuuuccaaac

SEQ ID NO: 100986 - RNA, 21 nt, Artificial Sequence
  LRRK2 RNA guide
aauucaucuugccaauaacga

SEQ ID NO: 100987 - RNA, 21 nt, Artificial Sequence
  LRRK2 RNA guide
aauuuggcuugaggaaccucu

SEQ ID NO: 100988 - RNA, 21 nt, Artificial Sequence
  LRRK2 RNA guide
aauuuugggaauaaccaagaa

SEQ ID NO: 100989 - RNA, 21 nt, Artificial Sequence
  LRRK2 RNA guide
acaacuaaaggcuagaaaucu

SEQ ID NO: 100990 - RNA, 21 nt, Artificial Sequence
  LRRK2 RNA guide
acaagaguuugcuagugacaa

SEQ ID NO: 100991 - RNA, 21 nt, Artificial Sequence
  LRRK2 RNA guide
acaagguauacuacaacuaaa

SEQ ID NO: 100992 - RNA, 21 nt, Artificial Sequence
  LRRK2 RNA guide
acaauauucccaucuuaaaau

SEQ ID NO: 100993 - RNA, 21 nt, Artificial Sequence
  LRRK2 RNA guide
acacauacuggggcucuucau

SEQ ID NO: 100994 - RNA, 21 nt, Artificial Sequence
  LRRK2 RNA guide
acacuaaugaauucaucuugc

SEQ ID NO: 100995 - RNA, 21 nt, Artificial Sequence
  LRRK2 RNA guide
acacucagggaacacauacug

SEQ ID NO: 100996 - RNA, 21 nt, Artificial Sequence
  LRRK2 RNA guide
acagaagggagaaugaguuga

SEQ ID NO: 100997 - RNA, 21 nt, Artificial Sequence
  LRRK2 RNA guide
acagagcauguccuagaugag

SEQ ID NO: 100998 - RNA, 21 nt, Artificial Sequence
  LRRK2 RNA guide
acaguauggauggugguagaa

SEQ ID NO: 100999 - RNA, 21 nt, Artificial Sequence
  LRRK2 RNA guide
acagucagagguuccucaagc

SEQ ID NO: 101000 - RNA, 21 nt, Artificial Sequence
  LRRK2 RNA guide
acauacuggggcucuucaucc

SEQ ID NO: 101001 - RNA, 21 nt, Artificial Sequence
  LRRK2 RNA guide
acaugcucuguauugggaaga

SEQ ID NO: 101002 - RNA, 21 nt, Artificial Sequence
  LRRK2 RNA guide
acauugccaguaaaacgucuc

SEQ ID NO: 101003 - RNA, 21 nt, Artificial Sequence
  LRRK2 RNA guide
accaacaguauggaugguggu

SEQ ID NO: 101004 - RNA, 21 nt, Artificial Sequence
  LRRK2 RNA guide
accaagaacucucggcuauau

SEQ ID NO: 101005 - RNA, 21 nt, Artificial Sequence
  LRRK2 RNA guide
accaccauccauacuguuggu

SEQ ID NO: 101006 - RNA, 21 nt, Artificial Sequence
  LRRK2 RNA guide
accauccauacuguugguuuu

SEQ ID NO: 101007 - RNA, 21 nt, Artificial Sequence
  LRRK2 RNA guide
acccauuuuuauccuccuucu

SEQ ID NO: 101008 - RNA, 21 nt, Artificial Sequence
  LRRK2 RNA guide
accgaacccauuuuuauccuc

SEQ ID NO: 101009 - RNA, 21 nt, Artificial Sequence
  LRRK2 RNA guide
accucugacugugauuuuaag

SEQ ID NO: 101010 - RNA, 21 nt, Artificial Sequence
  LRRK2 RNA guide
acgagacuaaaaccgaaccca

SEQ ID NO: 101011 - RNA, 21 nt, Artificial Sequence
  LRRK2 RNA guide
acgcaauguaaacgggaugaa

SEQ ID NO: 101012 - RNA, 21 nt, Artificial Sequence
  LRRK2 RNA guide
acgggaugaagagccccagua

SEQ ID NO: 101013 - RNA, 21 nt, Artificial Sequence
  LRRK2 RNA guide
acgucuccuuccaaacagaag

SEQ ID NO: 101014 - RNA, 21 nt, Artificial Sequence
  LRRK2 RNA guide
acguuuuacuggcaauguuaa

SEQ ID NO: 101015 - RNA, 21 nt, Artificial Sequence
  LRRK2 RNA guide
acuaaaaccgaacccauuuuu

SEQ ID NO: 101016 - RNA, 21 nt, Artificial Sequence
  LRRK2 RNA guide
acuaaugaauucaucuugcca

SEQ ID NO: 101017 - RNA, 21 nt, Artificial Sequence
  LRRK2 RNA guide
acuacaacuaaaggcuagaaa

SEQ ID NO: 101018 - RNA, 21 nt, Artificial Sequence
  LRRK2 RNA guide
acuagcaaacucuuguagagu

SEQ ID NO: 101019 - RNA, 21 nt, Artificial Sequence
  LRRK2 RNA guide
acuauucauaaucuucucauc

SEQ ID NO: 101020 - RNA, 21 nt, Artificial Sequence
  LRRK2 RNA guide
acuauuccaaguaucuuccca

SEQ ID NO: 101021 - RNA, 21 nt, Artificial Sequence
  LRRK2 RNA guide
acucagggaacacauacuggg

SEQ ID NO: 101022 - RNA, 21 nt, Artificial Sequence
  LRRK2 RNA guide
acucauucucccuucuguuug

SEQ ID NO: 101023 - RNA, 21 nt, Artificial Sequence
  LRRK2 RNA guide
acucuacaagaguuugcuagu

SEQ ID NO: 101024 - RNA, 21 nt, Artificial Sequence
  LRRK2 RNA guide
acucucggcuauauuaacauu

SEQ ID NO: 101025 - RNA, 21 nt, Artificial Sequence
  LRRK2 RNA guide
acucuuguagaguucagcacu

SEQ ID NO: 101026 - RNA, 21 nt, Artificial Sequence
  LRRK2 RNA guide
acuggcaauguuaauauagcc

SEQ ID NO: 101027 - RNA, 21 nt, Artificial Sequence
  LRRK2 RNA guide
acuggggcucuucaucccguu

SEQ ID NO: 101028 - RNA, 21 nt, Artificial Sequence
  LRRK2 RNA guide
acugugauuuuaagaugggaa

SEQ ID NO: 101029 - RNA, 21 nt, Artificial Sequence
  LRRK2 RNA guide
acuucaacucauucucccuuc

SEQ ID NO: 101030 - RNA, 21 nt, Artificial Sequence
  LRRK2 RNA guide
acuucuuaaagacacucaggg

SEQ ID NO: 101031 - RNA, 21 nt, Artificial Sequence
  LRRK2 RNA guide
acuugacuauuccaaguaucu

SEQ ID NO: 101032 - RNA, 21 nt, Artificial Sequence
  LRRK2 RNA guide
acuuggaauagucaagucuaa

SEQ ID NO: 101033 - RNA, 21 nt, Artificial Sequence
  LRRK2 RNA guide
acuuuauaaaaccaacaguau

SEQ ID NO: 101034 - RNA, 21 nt, Artificial Sequence
  LRRK2 RNA guide
acuuugucacuagcaaacucu

SEQ ID NO: 101035 - RNA, 21 nt, Artificial Sequence
  LRRK2 RNA guide
agaacucucggcuauauuaac

SEQ ID NO: 101036 - RNA, 21 nt, Artificial Sequence
  LRRK2 RNA guide
agaaggaggauaaaaaugggu

SEQ ID NO: 101037 - RNA, 21 nt, Artificial Sequence
  LRRK2 RNA guide
agaagggagaaugaguugaag

SEQ ID NO: 101038 - RNA, 21 nt, Artificial Sequence
  LRRK2 RNA guide
agaaugaguugaagugaaaac

SEQ ID NO: 101039 - RNA, 21 nt, Artificial Sequence
  LRRK2 RNA guide
agacacucagggaacacauac

SEQ ID NO: 101040 - RNA, 21 nt, Artificial Sequence
  LRRK2 RNA guide
agacguuuuacuggcaauguu

SEQ ID NO: 101041 - RNA, 21 nt, Artificial Sequence
  LRRK2 RNA guide
agacuaaaaccgaacccauuu

SEQ ID NO: 101042 - RNA, 21 nt, Artificial Sequence
  LRRK2 RNA guide
agacuugacuauuccaaguau

SEQ ID NO: 101043 - RNA, 21 nt, Artificial Sequence
  LRRK2 RNA guide
agagcauguccuagaugagaa

SEQ ID NO: 101044 - RNA, 21 nt, Artificial Sequence
  LRRK2 RNA guide
agagccccaguauguguuccc

SEQ ID NO: 101045 - RNA, 21 nt, Artificial Sequence
  LRRK2 RNA guide
agagguuccucaagccaaauu

SEQ ID NO: 101046 - RNA, 21 nt, Artificial Sequence
  LRRK2 RNA guide
agaguucuugguuauucccaa

SEQ ID NO: 101047 - RNA, 21 nt, Artificial Sequence
  LRRK2 RNA guide
agaguuugcuagugacaaagu

SEQ ID NO: 101048 - RNA, 21 nt, Artificial Sequence
  LRRK2 RNA guide
agauacuuggaauagucaagu

SEQ ID NO: 101049 - RNA, 21 nt, Artificial Sequence
  LRRK2 RNA guide
agaugagaagauuaugaauag

SEQ ID NO: 101050 - RNA, 21 nt, Artificial Sequence
  LRRK2 RNA guide
agauuaugaauaguuuggaaa

SEQ ID NO: 101051 - RNA, 21 nt, Artificial Sequence
  LRRK2 RNA guide
agauuucuagccuuuaguugu

SEQ ID NO: 101052 - RNA, 21 nt, Artificial Sequence
  LRRK2 RNA guide
agcaaacucuuguagaguuca

SEQ ID NO: 101053 - RNA, 21 nt, Artificial Sequence
  LRRK2 RNA guide
agcauguccuagaugagaaga

SEQ ID NO: 101054 - RNA, 21 nt, Artificial Sequence
  LRRK2 RNA guide
agccaaauuuugggaauaacc

SEQ ID NO: 101055 - RNA, 21 nt, Artificial Sequence
  LRRK2 RNA guide
agccccaguauguguucccug

SEQ ID NO: 101056 - RNA, 21 nt, Artificial Sequence
  LRRK2 RNA guide
agccgagaguucuugguuauu

SEQ ID NO: 101057 - RNA, 21 nt, Artificial Sequence
  LRRK2 RNA guide
aggaaccucugacugugauuu

SEQ ID NO: 101058 - RNA, 21 nt, Artificial Sequence
  LRRK2 RNA guide
aggacaugcucuguauuggga

SEQ ID NO: 101059 - RNA, 21 nt, Artificial Sequence
  LRRK2 RNA guide
aggagacguuuuacuggcaau

SEQ ID NO: 101060 - RNA, 21 nt, Artificial Sequence
  LRRK2 RNA guide
aggaggauaaaaauggguucg

SEQ ID NO: 101061 - RNA, 21 nt, Artificial Sequence
  LRRK2 RNA guide
aggauaaaaauggguucgguu

SEQ ID NO: 101062 - RNA, 21 nt, Artificial Sequence
  LRRK2 RNA guide
aggcauuguuuucacuucaac

SEQ ID NO: 101063 - RNA, 21 nt, Artificial Sequence
  LRRK2 RNA guide
agggaacacauacuggggcuc

SEQ ID NO: 101064 - RNA, 21 nt, Artificial Sequence
  LRRK2 RNA guide
agggagaaugaguugaaguga

SEQ ID NO: 101065 - RNA, 21 nt, Artificial Sequence
  LRRK2 RNA guide
agguauacuacaacuaaaggc

SEQ ID NO: 101066 - RNA, 21 nt, Artificial Sequence
  LRRK2 RNA guide
agguuccucaagccaaauuuu

SEQ ID NO: 101067 - RNA, 21 nt, Artificial Sequence
  LRRK2 RNA guide
aguaaaacgucuccuuccaaa

SEQ ID NO: 101068 - RNA, 21 nt, Artificial Sequence
  LRRK2 RNA guide
aguaucuucccaauacagagc

SEQ ID NO: 101069 - RNA, 21 nt, Artificial Sequence
  LRRK2 RNA guide
aguauggauggugguagaagg

SEQ ID NO: 101070 - RNA, 21 nt, Artificial Sequence
  LRRK2 RNA guide
aguauguguucccugaguguc

SEQ ID NO: 101071 - RNA, 21 nt, Artificial Sequence
  LRRK2 RNA guide
agucaagucuaaacacuaaug

SEQ ID NO: 101072 - RNA, 21 nt, Artificial Sequence
  LRRK2 RNA guide
agucagagguuccucaagcca

SEQ ID NO: 101073 - RNA, 21 nt, Artificial Sequence
  LRRK2 RNA guide
agucucguuauuggcaagaug

SEQ ID NO: 101074 - RNA, 21 nt, Artificial Sequence
  LRRK2 RNA guide
agugacaaaguugcauuuuau

SEQ ID NO: 101075 - RNA, 21 nt, Artificial Sequence
  LRRK2 RNA guide
agugauaaaaugcaacuuugu

SEQ ID NO: 101076 - RNA, 21 nt, Artificial Sequence
  LRRK2 RNA guide
agugcugaacucuacaagagu

SEQ ID NO: 101077 - RNA, 21 nt, Artificial Sequence
  LRRK2 RNA guide
aguguuuagacuugacuauuc

SEQ ID NO: 101078 - RNA, 21 nt, Artificial Sequence
  LRRK2 RNA guide
aguuacuucuuaaagacacuc

SEQ ID NO: 101079 - RNA, 21 nt, Artificial Sequence
  LRRK2 RNA guide
aguucuugguuauucccaaaa

SEQ ID NO: 101080 - RNA, 21 nt, Artificial Sequence
  LRRK2 RNA guide
aguugaagugaaaacaaugcc

SEQ ID NO: 101081 - RNA, 21 nt, Artificial Sequence
  LRRK2 RNA guide
aguuugcuagugacaaaguug

SEQ ID NO: 101082 - RNA, 21 nt, Artificial Sequence
  LRRK2 RNA guide
auaaaaauggguucgguuuua

SEQ ID NO: 101083 - RNA, 21 nt, Artificial Sequence
  LRRK2 RNA guide
auaaaaccaacaguauggaug

SEQ ID NO: 101084 - RNA, 21 nt, Artificial Sequence
  LRRK2 RNA guide
auaaaaugcaacuuugucacu

SEQ ID NO: 101085 - RNA, 21 nt, Artificial Sequence
  LRRK2 RNA guide
auaaccaagaacucucggcua

SEQ ID NO: 101086 - RNA, 21 nt, Artificial Sequence
  LRRK2 RNA guide
auaacgagacuaaaaccgaac

SEQ ID NO: 101087 - RNA, 21 nt, Artificial Sequence
  LRRK2 RNA guide
auaaucuucucaucuaggaca

SEQ ID NO: 101088 - RNA, 21 nt, Artificial Sequence
  LRRK2 RNA guide
auacagagcauguccuagaug

SEQ ID NO: 101089 - RNA, 21 nt, Artificial Sequence
  LRRK2 RNA guide
auacuacaacuaaaggcuaga

SEQ ID NO: 101090 - RNA, 21 nt, Artificial Sequence
  LRRK2 RNA guide
auacuggggcucuucaucccg

SEQ ID NO: 101091 - RNA, 21 nt, Artificial Sequence
  LRRK2 RNA guide
auacuuggaauagucaagucu

SEQ ID NO: 101092 - RNA, 21 nt, Artificial Sequence
  LRRK2 RNA guide
auagccgagaguucuugguua

SEQ ID NO: 101093 - RNA, 21 nt, Artificial Sequence
  LRRK2 RNA guide
auagugauaaaaugcaacuuu

SEQ ID NO: 101094 - RNA, 21 nt, Artificial Sequence
  LRRK2 RNA guide
auauagccgagaguucuuggu

SEQ ID NO: 101095 - RNA, 21 nt, Artificial Sequence
  LRRK2 RNA guide
auauuaacauugccaguaaaa

SEQ ID NO: 101096 - RNA, 21 nt, Artificial Sequence
  LRRK2 RNA guide
auauucccaucuuaaaaucac

SEQ ID NO: 101097 - RNA, 21 nt, Artificial Sequence
  LRRK2 RNA guide
aucacagucagagguuccuca

SEQ ID NO: 101098 - RNA, 21 nt, Artificial Sequence
  LRRK2 RNA guide
aucacuauuaauuauuccccu

SEQ ID NO: 101099 - RNA, 21 nt, Artificial Sequence
  LRRK2 RNA guide
aucauuacgcaauguaaacgg

SEQ ID NO: 101100 - RNA, 21 nt, Artificial Sequence
  LRRK2 RNA guide
aucccguuuacauugcguaau

SEQ ID NO: 101101 - RNA, 21 nt, Artificial Sequence
  LRRK2 RNA guide
auccuccuucuaccaccaucc

SEQ ID NO: 101102 - RNA, 21 nt, Artificial Sequence
  LRRK2 RNA guide
aucuaggacaugcucuguauu

SEQ ID NO: 101103 - RNA, 21 nt, Artificial Sequence
  LRRK2 RNA guide
aucuuaaaaucacagucagag

SEQ ID NO: 101104 - RNA, 21 nt, Artificial Sequence
  LRRK2 RNA guide
aucuucccaauacagagcaug

SEQ ID NO: 101105 - RNA, 21 nt, Artificial Sequence
  LRRK2 RNA guide
aucuucucaucuaggacaugc

SEQ ID NO: 101106 - RNA, 21 nt, Artificial Sequence
  LRRK2 RNA guide
aucuugccaauaacgagacua

SEQ ID NO: 101107 - RNA, 21 nt, Artificial Sequence
  LRRK2 RNA guide
augaagagccccaguaugugu

SEQ ID NO: 101108 - RNA, 21 nt, Artificial Sequence
  LRRK2 RNA guide
augaauaguuuggaaaagggg

SEQ ID NO: 101109 - RNA, 21 nt, Artificial Sequence
  LRRK2 RNA guide
augaauucaucuugccaauaa

SEQ ID NO: 101110 - RNA, 21 nt, Artificial Sequence
  LRRK2 RNA guide
augaguugaagugaaaacaau

SEQ ID NO: 101111 - RNA, 21 nt, Artificial Sequence
  LRRK2 RNA guide
augcaacuuugucacuagcaa

SEQ ID NO: 101112 - RNA, 21 nt, Artificial Sequence
  LRRK2 RNA guide
augcucuguauugggaagaua

SEQ ID NO: 101113 - RNA, 21 nt, Artificial Sequence
  LRRK2 RNA guide
auggauggugguagaaggagg

SEQ ID NO: 101114 - RNA, 21 nt, Artificial Sequence
  LRRK2 RNA guide
augggaauauuguuaaaucau

SEQ ID NO: 101115 - RNA, 21 nt, Artificial Sequence
  LRRK2 RNA guide
auggguucgguuuuagucucg

SEQ ID NO: 101116 - RNA, 21 nt, Artificial Sequence
  LRRK2 RNA guide
auggugguagaaggaggauaa

SEQ ID NO: 101117 - RNA, 21 nt, Artificial Sequence
  LRRK2 RNA guide
auguaaacgggaugaagagcc

SEQ ID NO: 101118 - RNA, 21 nt, Artificial Sequence
  LRRK2 RNA guide
auguccuagaugagaagauua

SEQ ID NO: 101119 - RNA, 21 nt, Artificial Sequence
  LRRK2 RNA guide
auguguucccugagugucuuu

SEQ ID NO: 101120 - RNA, 21 nt, Artificial Sequence
  LRRK2 RNA guide
auguuaauauagccgagaguu

SEQ ID NO: 101121 - RNA, 21 nt, Artificial Sequence
  LRRK2 RNA guide
auuaacauugccaguaaaacg

SEQ ID NO: 101122 - RNA, 21 nt, Artificial Sequence
  LRRK2 RNA guide
auuacgcaauguaaacgggau

SEQ ID NO: 101123 - RNA, 21 nt, Artificial Sequence
  LRRK2 RNA guide
auuaguguuuagacuugacua

SEQ ID NO: 101124 - RNA, 21 nt, Artificial Sequence
  LRRK2 RNA guide
auuaugaauaguuuggaaaag

SEQ ID NO: 101125 - RNA, 21 nt, Artificial Sequence
  LRRK2 RNA guide
auuauuccccuuuuccaaacu

SEQ ID NO: 101126 - RNA, 21 nt, Artificial Sequence
  LRRK2 RNA guide
auucaaagauuucuagccuuu

SEQ ID NO: 101127 - RNA, 21 nt, Artificial Sequence
  LRRK2 RNA guide
auucauaaucuucucaucuag

SEQ ID NO: 101128 - RNA, 21 nt, Artificial Sequence
  LRRK2 RNA guide
auucaucuugccaauaacgag

SEQ ID NO: 101129 - RNA, 21 nt, Artificial Sequence
  LRRK2 RNA guide
auuccaaguaucuucccaaua

SEQ ID NO: 101130 - RNA, 21 nt, Artificial Sequence
  LRRK2 RNA guide
auucccaaaauuuggcuugag

SEQ ID NO: 101131 - RNA, 21 nt, Artificial Sequence
  LRRK2 RNA guide
auucccaucuuaaaaucacag

SEQ ID NO: 101132 - RNA, 21 nt, Artificial Sequence
  LRRK2 RNA guide
auuccccuuuuccaaacuauu

SEQ ID NO: 101133 - RNA, 21 nt, Artificial Sequence
  LRRK2 RNA guide
auucucccuucuguuuggaag

SEQ ID NO: 101134 - RNA, 21 nt, Artificial Sequence
  LRRK2 RNA guide
auugccaguaaaacgucuccu

SEQ ID NO: 101135 - RNA, 21 nt, Artificial Sequence
  LRRK2 RNA guide
auuggcaagaugaauucauua

SEQ ID NO: 101136 - RNA, 21 nt, Artificial Sequence
  LRRK2 RNA guide
auugggaagauacuuggaaua

SEQ ID NO: 101137 - RNA, 21 nt, Artificial Sequence
  LRRK2 RNA guide
auuguuuucacuucaacucau

SEQ ID NO: 101138 - RNA, 21 nt, Artificial Sequence
  LRRK2 RNA guide
auuucuagccuuuaguuguag

SEQ ID NO: 101139 - RNA, 21 nt, Artificial Sequence
  LRRK2 RNA guide
auuuggcuugaggaaccucug

SEQ ID NO: 101140 - RNA, 21 nt, Artificial Sequence
  LRRK2 RNA guide
auuuugggaauaaccaagaac

SEQ ID NO: 101141 - RNA, 21 nt, Artificial Sequence
  LRRK2 RNA guide
auuuuuauccuccuucuacca

SEQ ID NO: 101142 - RNA, 21 nt, Artificial Sequence
  LRRK2 RNA guide
caaaauuuggcuugaggaacc

SEQ ID NO: 101143 - RNA, 21 nt, Artificial Sequence
  LRRK2 RNA guide
caaacagaagggagaaugagu

SEQ ID NO: 101144 - RNA, 21 nt, Artificial Sequence
  LRRK2 RNA guide
caaacucuuguagaguucagc

SEQ ID NO: 101145 - RNA, 21 nt, Artificial Sequence
  LRRK2 RNA guide
caaagauuucuagccuuuagu

SEQ ID NO: 101146 - RNA, 21 nt, Artificial Sequence
  LRRK2 RNA guide
caaauuuugggaauaaccaag

SEQ ID NO: 101147 - RNA, 21 nt, Artificial Sequence
  LRRK2 RNA guide
caacaguauggauggugguag

SEQ ID NO: 101148 - RNA, 21 nt, Artificial Sequence
  LRRK2 RNA guide
caacuaaaggcuagaaaucuu

SEQ ID NO: 101149 - RNA, 21 nt, Artificial Sequence
  LRRK2 RNA guide
caacucauucucccuucuguu

SEQ ID NO: 101150 - RNA, 21 nt, Artificial Sequence
  LRRK2 RNA guide
caacuuugucacuagcaaacu

SEQ ID NO: 101151 - RNA, 21 nt, Artificial Sequence
  LRRK2 RNA guide
caagaacucucggcuauauua

SEQ ID NO: 101152 - RNA, 21 nt, Artificial Sequence
  LRRK2 RNA guide
caagaguuugcuagugacaaa

SEQ ID NO: 101153 - RNA, 21 nt, Artificial Sequence
  LRRK2 RNA guide
caagaugaauucauuaguguu

SEQ ID NO: 101154 - RNA, 21 nt, Artificial Sequence
  LRRK2 RNA guide
caagccaaauuuugggaauaa

SEQ ID NO: 101155 - RNA, 21 nt, Artificial Sequence
  LRRK2 RNA guide
caagguauacuacaacuaaag

SEQ ID NO: 101156 - RNA, 21 nt, Artificial Sequence
  LRRK2 RNA guide
caaguaucuucccaauacaga

SEQ ID NO: 101157 - RNA, 21 nt, Artificial Sequence
  LRRK2 RNA guide
caagucuaaacacuaaugaau

SEQ ID NO: 101158 - RNA, 21 nt, Artificial Sequence
  LRRK2 RNA guide
caauaacgagacuaaaaccga

SEQ ID NO: 101159 - RNA, 21 nt, Artificial Sequence
  LRRK2 RNA guide
caauacagagcauguccuaga

SEQ ID NO: 101160 - RNA, 21 nt, Artificial Sequence
  LRRK2 RNA guide
caauauucccaucuuaaaauc

SEQ ID NO: 101161 - RNA, 21 nt, Artificial Sequence
  LRRK2 RNA guide
caauguaaacgggaugaagag

SEQ ID NO: 101162 - RNA, 21 nt, Artificial Sequence
  LRRK2 RNA guide
caauguuaauauagccgagag

SEQ ID NO: 101163 - RNA, 21 nt, Artificial Sequence
  LRRK2 RNA guide
cacagucagagguuccucaag

SEQ ID NO: 101164 - RNA, 21 nt, Artificial Sequence
  LRRK2 RNA guide
cacauacuggggcucuucauc

SEQ ID NO: 101165 - RNA, 21 nt, Artificial Sequence
  LRRK2 RNA guide
caccauccauacuguugguuu

SEQ ID NO: 101166 - RNA, 21 nt, Artificial Sequence
  LRRK2 RNA guide
cacuaaugaauucaucuugcc

SEQ ID NO: 101167 - RNA, 21 nt, Artificial Sequence
  LRRK2 RNA guide
cacuagcaaacucuuguagag

SEQ ID NO: 101168 - RNA, 21 nt, Artificial Sequence
  LRRK2 RNA guide
cacuauuaauuauuccccuuu

SEQ ID NO: 101169 - RNA, 21 nt, Artificial Sequence
  LRRK2 RNA guide
cacucagggaacacauacugg

SEQ ID NO: 101170 - RNA, 21 nt, Artificial Sequence
  LRRK2 RNA guide
cacuucaacucauucucccuu

SEQ ID NO: 101171 - RNA, 21 nt, Artificial Sequence
  LRRK2 RNA guide
cagaagggagaaugaguugaa

SEQ ID NO: 101172 - RNA, 21 nt, Artificial Sequence
  LRRK2 RNA guide
cagagcauguccuagaugaga

SEQ ID NO: 101173 - RNA, 21 nt, Artificial Sequence
  LRRK2 RNA guide
cagagguuccucaagccaaau

SEQ ID NO: 101174 - RNA, 21 nt, Artificial Sequence
  LRRK2 RNA guide
cagggaacacauacuggggcu

SEQ ID NO: 101175 - RNA, 21 nt, Artificial Sequence
  LRRK2 RNA guide
caguaaaacgucuccuuccaa

SEQ ID NO: 101176 - RNA, 21 nt, Artificial Sequence
  LRRK2 RNA guide
caguauggauggugguagaag

SEQ ID NO: 101177 - RNA, 21 nt, Artificial Sequence
  LRRK2 RNA guide
caguauguguucccugagugu

SEQ ID NO: 101178 - RNA, 21 nt, Artificial Sequence
  LRRK2 RNA guide
cagucagagguuccucaagcc

SEQ ID NO: 101179 - RNA, 21 nt, Artificial Sequence
  LRRK2 RNA guide
cauaaucuucucaucuaggac

SEQ ID NO: 101180 - RNA, 21 nt, Artificial Sequence
  LRRK2 RNA guide
cauacuggggcucuucauccc

SEQ ID NO: 101181 - RNA, 21 nt, Artificial Sequence
  LRRK2 RNA guide
cauccauacuguugguuuuau

SEQ ID NO: 101182 - RNA, 21 nt, Artificial Sequence
  LRRK2 RNA guide
caucccguuuacauugcguaa

SEQ ID NO: 101183 - RNA, 21 nt, Artificial Sequence
  LRRK2 RNA guide
caucuaggacaugcucuguau

SEQ ID NO: 101184 - RNA, 21 nt, Artificial Sequence
  LRRK2 RNA guide
caucuuaaaaucacagucaga

SEQ ID NO: 101185 - RNA, 21 nt, Artificial Sequence
  LRRK2 RNA guide
caucuugccaauaacgagacu

SEQ ID NO: 101186 - RNA, 21 nt, Artificial Sequence
  LRRK2 RNA guide
caugcucuguauugggaagau

SEQ ID NO: 101187 - RNA, 21 nt, Artificial Sequence
  LRRK2 RNA guide
cauguccuagaugagaagauu

SEQ ID NO: 101188 - RNA, 21 nt, Artificial Sequence
  LRRK2 RNA guide
cauuacgcaauguaaacggga

SEQ ID NO: 101189 - RNA, 21 nt, Artificial Sequence
  LRRK2 RNA guide
cauuaguguuuagacuugacu

SEQ ID NO: 101190 - RNA, 21 nt, Artificial Sequence
  LRRK2 RNA guide
cauucucccuucuguuuggaa

SEQ ID NO: 101191 - RNA, 21 nt, Artificial Sequence
  LRRK2 RNA guide
cauugccaguaaaacgucucc

SEQ ID NO: 101192 - RNA, 21 nt, Artificial Sequence
  LRRK2 RNA guide
cauuguuuucacuucaacuca

SEQ ID NO: 101193 - RNA, 21 nt, Artificial Sequence
  LRRK2 RNA guide
cauuuuuauccuccuucuacc

SEQ ID NO: 101194 - RNA, 21 nt, Artificial Sequence
  LRRK2 RNA guide
ccaaaauuuggcuugaggaac

SEQ ID NO: 101195 - RNA, 21 nt, Artificial Sequence
  LRRK2 RNA guide
ccaaacagaagggagaaugag

SEQ ID NO: 101196 - RNA, 21 nt, Artificial Sequence
  LRRK2 RNA guide
ccaaacuauucauaaucuucu

SEQ ID NO: 101197 - RNA, 21 nt, Artificial Sequence
  LRRK2 RNA guide
ccaaauuuugggaauaaccaa

SEQ ID NO: 101198 - RNA, 21 nt, Artificial Sequence
  LRRK2 RNA guide
ccaacaguauggaugguggua

SEQ ID NO: 101199 - RNA, 21 nt, Artificial Sequence
  LRRK2 RNA guide
ccaagaacucucggcuauauu

SEQ ID NO: 101200 - RNA, 21 nt, Artificial Sequence
  LRRK2 RNA guide
ccaaguaucuucccaauacag

SEQ ID NO: 101201 - RNA, 21 nt, Artificial Sequence
  LRRK2 RNA guide
ccaauaacgagacuaaaaccg

SEQ ID NO: 101202 - RNA, 21 nt, Artificial Sequence
  LRRK2 RNA guide
ccaauacagagcauguccuag

SEQ ID NO: 101203 - RNA, 21 nt, Artificial Sequence
  LRRK2 RNA guide
ccaccauccauacuguugguu

SEQ ID NO: 101204 - RNA, 21 nt, Artificial Sequence
  LRRK2 RNA guide
ccaguaaaacgucuccuucca

SEQ ID NO: 101205 - RNA, 21 nt, Artificial Sequence
  LRRK2 RNA guide
ccaguauguguucccugagug

SEQ ID NO: 101206 - RNA, 21 nt, Artificial Sequence
  LRRK2 RNA guide
ccauacuguugguuuuauaaa

SEQ ID NO: 101207 - RNA, 21 nt, Artificial Sequence
  LRRK2 RNA guide
ccauccauacuguugguuuua

SEQ ID NO: 101208 - RNA, 21 nt, Artificial Sequence
  LRRK2 RNA guide
ccaucuuaaaaucacagucag

SEQ ID NO: 101209 - RNA, 21 nt, Artificial Sequence
  LRRK2 RNA guide
ccauuuuuauccuccuucuac

SEQ ID NO: 101210 - RNA, 21 nt, Artificial Sequence
  LRRK2 RNA guide
cccaaaauuuggcuugaggaa

SEQ ID NO: 101211 - RNA, 21 nt, Artificial Sequence
  LRRK2 RNA guide
cccaauacagagcauguccua

SEQ ID NO: 101212 - RNA, 21 nt, Artificial Sequence
  LRRK2 RNA guide
cccaguauguguucccugagu

SEQ ID NO: 101213 - RNA, 21 nt, Artificial Sequence
  LRRK2 RNA guide
cccaucuuaaaaucacaguca

SEQ ID NO: 101214 - RNA, 21 nt, Artificial Sequence
  LRRK2 RNA guide
cccauuuuuauccuccuucua

SEQ ID NO: 101215 - RNA, 21 nt, Artificial Sequence
  LRRK2 RNA guide
ccccaguauguguucccugag

SEQ ID NO: 101216 - RNA, 21 nt, Artificial Sequence
  LRRK2 RNA guide
ccccuuuuccaaacuauucau

SEQ ID NO: 101217 - RNA, 21 nt, Artificial Sequence
  LRRK2 RNA guide
cccguuuacauugcguaauga

SEQ ID NO: 101218 - RNA, 21 nt, Artificial Sequence
  LRRK2 RNA guide
cccugagugucuuuaagaagu

SEQ ID NO: 101219 - RNA, 21 nt, Artificial Sequence
  LRRK2 RNA guide
cccuucuguuuggaaggagac

SEQ ID NO: 101220 - RNA, 21 nt, Artificial Sequence
  LRRK2 RNA guide
cccuuuuccaaacuauucaua

SEQ ID NO: 101221 - RNA, 21 nt, Artificial Sequence
  LRRK2 RNA guide
ccgaacccauuuuuauccucc

SEQ ID NO: 101222 - RNA, 21 nt, Artificial Sequence
  LRRK2 RNA guide
ccgagaguucuugguuauucc

SEQ ID NO: 101223 - RNA, 21 nt, Artificial Sequence
  LRRK2 RNA guide
ccguuuacauugcguaaugau

SEQ ID NO: 101224 - RNA, 21 nt, Artificial Sequence
  LRRK2 RNA guide
ccuagaugagaagauuaugaa

SEQ ID NO: 101225 - RNA, 21 nt, Artificial Sequence
  LRRK2 RNA guide
ccucaagccaaauuuugggaa

SEQ ID NO: 101226 - RNA, 21 nt, Artificial Sequence
  LRRK2 RNA guide
ccuccuucuaccaccauccau

SEQ ID NO: 101227 - RNA, 21 nt, Artificial Sequence
  LRRK2 RNA guide
ccucugacugugauuuuaaga

SEQ ID NO: 101228 - RNA, 21 nt, Artificial Sequence
  LRRK2 RNA guide
ccugagugucuuuaagaagua

SEQ ID NO: 101229 - RNA, 21 nt, Artificial Sequence
  LRRK2 RNA guide
ccuuccaaacagaagggagaa

SEQ ID NO: 101230 - RNA, 21 nt, Artificial Sequence
  LRRK2 RNA guide
ccuucuaccaccauccauacu

SEQ ID NO: 101231 - RNA, 21 nt, Artificial Sequence
  LRRK2 RNA guide
ccuucuguuuggaaggagacg

SEQ ID NO: 101232 - RNA, 21 nt, Artificial Sequence
  LRRK2 RNA guide
ccuuuuccaaacuauucauaa

SEQ ID NO: 101233 - RNA, 21 nt, Artificial Sequence
  LRRK2 RNA guide
cgaacccauuuuuauccuccu

SEQ ID NO: 101234 - RNA, 21 nt, Artificial Sequence
  LRRK2 RNA guide
cgagacuaaaaccgaacccau

SEQ ID NO: 101235 - RNA, 21 nt, Artificial Sequence
  LRRK2 RNA guide
cgagaguucuugguuauuccc

SEQ ID NO: 101236 - RNA, 21 nt, Artificial Sequence
  LRRK2 RNA guide
cgcaauguaaacgggaugaag

SEQ ID NO: 101237 - RNA, 21 nt, Artificial Sequence
  LRRK2 RNA guide
cggcuauauuaacauugccag

SEQ ID NO: 101238 - RNA, 21 nt, Artificial Sequence
  LRRK2 RNA guide
cgggaugaagagccccaguau

SEQ ID NO: 101239 - RNA, 21 nt, Artificial Sequence
  LRRK2 RNA guide
cgguuuuagucucguuauugg

SEQ ID NO: 101240 - RNA, 21 nt, Artificial Sequence
  LRRK2 RNA guide
cguaaugauuuaacaauauuc

SEQ ID NO: 101241 - RNA, 21 nt, Artificial Sequence
  LRRK2 RNA guide
cgucuccuuccaaacagaagg

SEQ ID NO: 101242 - RNA, 21 nt, Artificial Sequence
  LRRK2 RNA guide
cguuauuggcaagaugaauuc

SEQ ID NO: 101243 - RNA, 21 nt, Artificial Sequence
  LRRK2 RNA guide
cguuuacauugcguaaugauu

SEQ ID NO: 101244 - RNA, 21 nt, Artificial Sequence
  LRRK2 RNA guide
cguuuuacuggcaauguuaau

SEQ ID NO: 101245 - RNA, 21 nt, Artificial Sequence
  LRRK2 RNA guide
cuaaaaccgaacccauuuuua

SEQ ID NO: 101246 - RNA, 21 nt, Artificial Sequence
  LRRK2 RNA guide
cuaaacacuaaugaauucauc

SEQ ID NO: 101247 - RNA, 21 nt, Artificial Sequence
  LRRK2 RNA guide
cuaaugaauucaucuugccaa

SEQ ID NO: 101248 - RNA, 21 nt, Artificial Sequence
  LRRK2 RNA guide
cuacaacuaaaggcuagaaau

SEQ ID NO: 101249 - RNA, 21 nt, Artificial Sequence
  LRRK2 RNA guide
cuacaagaguuugcuagugac

SEQ ID NO: 101250 - RNA, 21 nt, Artificial Sequence
  LRRK2 RNA guide
cuaccaccauccauacuguug

SEQ ID NO: 101251 - RNA, 21 nt, Artificial Sequence
  LRRK2 RNA guide
cuagcaaacucuuguagaguu

SEQ ID NO: 101252 - RNA, 21 nt, Artificial Sequence
  LRRK2 RNA guide
cuagccuuuaguuguaguaua

SEQ ID NO: 101253 - RNA, 21 nt, Artificial Sequence
  LRRK2 RNA guide
cuaggacaugcucuguauugg

SEQ ID NO: 101254 - RNA, 21 nt, Artificial Sequence
  LRRK2 RNA guide
cuagugacaaaguugcauuuu

SEQ ID NO: 101255 - RNA, 21 nt, Artificial Sequence
  LRRK2 RNA guide
cuauauuaacauugccaguaa

SEQ ID NO: 101256 - RNA, 21 nt, Artificial Sequence
  LRRK2 RNA guide
cuauuaauuauuccccuuuuc

SEQ ID NO: 101257 - RNA, 21 nt, Artificial Sequence
  LRRK2 RNA guide
cuauucauaaucuucucaucu

SEQ ID NO: 101258 - RNA, 21 nt, Artificial Sequence
  LRRK2 RNA guide
cuauuccaaguaucuucccaa

SEQ ID NO: 101259 - RNA, 21 nt, Artificial Sequence
  LRRK2 RNA guide
cucaagccaaauuuugggaau

SEQ ID NO: 101260 - RNA, 21 nt, Artificial Sequence
  LRRK2 RNA guide
cucagggaacacauacugggg

SEQ ID NO: 101261 - RNA, 21 nt, Artificial Sequence
  LRRK2 RNA guide
cucaucuaggacaugcucugu

SEQ ID NO: 101262 - RNA, 21 nt, Artificial Sequence
  LRRK2 RNA guide
cucauucucccuucuguuugg

SEQ ID NO: 101263 - RNA, 21 nt, Artificial Sequence
  LRRK2 RNA guide
cucccuucuguuuggaaggag

SEQ ID NO: 101264 - RNA, 21 nt, Artificial Sequence
  LRRK2 RNA guide
cuccuuccaaacagaagggag

SEQ ID NO: 101265 - RNA, 21 nt, Artificial Sequence
  LRRK2 RNA guide
cuccuucuaccaccauccaua

SEQ ID NO: 101266 - RNA, 21 nt, Artificial Sequence
  LRRK2 RNA guide
cucggcuauauuaacauugcc

SEQ ID NO: 101267 - RNA, 21 nt, Artificial Sequence
  LRRK2 RNA guide
cucguuauuggcaagaugaau

SEQ ID NO: 101268 - RNA, 21 nt, Artificial Sequence
  LRRK2 RNA guide
cucuacaagaguuugcuagug

SEQ ID NO: 101269 - RNA, 21 nt, Artificial Sequence
  LRRK2 RNA guide
cucucggcuauauuaacauug

SEQ ID NO: 101270 - RNA, 21 nt, Artificial Sequence
  LRRK2 RNA guide
cucugacugugauuuuaagau

SEQ ID NO: 101271 - RNA, 21 nt, Artificial Sequence
  LRRK2 RNA guide
cucuguauugggaagauacuu

SEQ ID NO: 101272 - RNA, 21 nt, Artificial Sequence
  LRRK2 RNA guide
cucuucaucccguuuacauug

SEQ ID NO: 101273 - RNA, 21 nt, Artificial Sequence
  LRRK2 RNA guide
cucuuguagaguucagcacuu

SEQ ID NO: 101274 - RNA, 21 nt, Artificial Sequence
  LRRK2 RNA guide
cugaacucuacaagaguuugc

SEQ ID NO: 101275 - RNA, 21 nt, Artificial Sequence
  LRRK2 RNA guide
cugacugugauuuuaagaugg

SEQ ID NO: 101276 - RNA, 21 nt, Artificial Sequence
  LRRK2 RNA guide
cugagugucuuuaagaaguaa

SEQ ID NO: 101277 - RNA, 21 nt, Artificial Sequence
  LRRK2 RNA guide
cuggcaauguuaauauagccg

SEQ ID NO: 101278 - RNA, 21 nt, Artificial Sequence
  LRRK2 RNA guide
cuggggcucuucaucccguuu

SEQ ID NO: 101279 - RNA, 21 nt, Artificial Sequence
  LRRK2 RNA guide
cuguauugggaagauacuugg

SEQ ID NO: 101280 - RNA, 21 nt, Artificial Sequence
  LRRK2 RNA guide
cugugauuuuaagaugggaau

SEQ ID NO: 101281 - RNA, 21 nt, Artificial Sequence
  LRRK2 RNA guide
cuguuuggaaggagacguuuu

SEQ ID NO: 101282 - RNA, 21 nt, Artificial Sequence
  LRRK2 RNA guide
cuuaaaaucacagucagaggu

SEQ ID NO: 101283 - RNA, 21 nt, Artificial Sequence
  LRRK2 RNA guide
cuuaaagacacucagggaaca

SEQ ID NO: 101284 - RNA, 21 nt, Artificial Sequence
  LRRK2 RNA guide
cuucaacucauucucccuucu

SEQ ID NO: 101285 - RNA, 21 nt, Artificial Sequence
  LRRK2 RNA guide
cuucaucccguuuacauugcg

SEQ ID NO: 101286 - RNA, 21 nt, Artificial Sequence
  LRRK2 RNA guide
cuuccaaacagaagggagaau

SEQ ID NO: 101287 - RNA, 21 nt, Artificial Sequence
  LRRK2 RNA guide
cuucccaauacagagcauguc

SEQ ID NO: 101288 - RNA, 21 nt, Artificial Sequence
  LRRK2 RNA guide
cuucuaccaccauccauacug

SEQ ID NO: 101289 - RNA, 21 nt, Artificial Sequence
  LRRK2 RNA guide
cuucucaucuaggacaugcuc

SEQ ID NO: 101290 - RNA, 21 nt, Artificial Sequence
  LRRK2 RNA guide
cuucuguuuggaaggagacgu

SEQ ID NO: 101291 - RNA, 21 nt, Artificial Sequence
  LRRK2 RNA guide
cuucuuaaagacacucaggga

SEQ ID NO: 101292 - RNA, 21 nt, Artificial Sequence
  LRRK2 RNA guide
cuugacuauuccaaguaucuu

SEQ ID NO: 101293 - RNA, 21 nt, Artificial Sequence
  LRRK2 RNA guide
cuugaggaaccucugacugug

SEQ ID NO: 101294 - RNA, 21 nt, Artificial Sequence
  LRRK2 RNA guide
cuugccaauaacgagacuaaa

SEQ ID NO: 101295 - RNA, 21 nt, Artificial Sequence
  LRRK2 RNA guide
cuuggaauagucaagucuaaa

SEQ ID NO: 101296 - RNA, 21 nt, Artificial Sequence
  LRRK2 RNA guide
cuugguuauucccaaaauuug

SEQ ID NO: 101297 - RNA, 21 nt, Artificial Sequence
  LRRK2 RNA guide
cuuguagaguucagcacuuuu

SEQ ID NO: 101298 - RNA, 21 nt, Artificial Sequence
  LRRK2 RNA guide
cuuuauaaaaccaacaguaug

SEQ ID NO: 101299 - RNA, 21 nt, Artificial Sequence
  LRRK2 RNA guide
cuuugucacuagcaaacucuu

SEQ ID NO: 101300 - RNA, 21 nt, Artificial Sequence
  LRRK2 RNA guide
gaacacauacuggggcucuuc

SEQ ID NO: 101301 - RNA, 21 nt, Artificial Sequence
  LRRK2 RNA guide
gaacccauuuuuauccuccuu

SEQ ID NO: 101302 - RNA, 21 nt, Artificial Sequence
  LRRK2 RNA guide
gaaccucugacugugauuuua

SEQ ID NO: 101303 - RNA, 21 nt, Artificial Sequence
  LRRK2 RNA guide
gaacucuacaagaguuugcua

SEQ ID NO: 101304 - RNA, 21 nt, Artificial Sequence
  LRRK2 RNA guide
gaacucucggcuauauuaaca

SEQ ID NO: 101305 - RNA, 21 nt, Artificial Sequence
  LRRK2 RNA guide
gaagagccccaguauguguuc

SEQ ID NO: 101306 - RNA, 21 nt, Artificial Sequence
  LRRK2 RNA guide
gaagauacuuggaauagucaa

SEQ ID NO: 101307 - RNA, 21 nt, Artificial Sequence
  LRRK2 RNA guide
gaagauuaugaauaguuugga

SEQ ID NO: 101308 - RNA, 21 nt, Artificial Sequence
  LRRK2 RNA guide
gaaggagacguuuuacuggca

SEQ ID NO: 101309 - RNA, 21 nt, Artificial Sequence
  LRRK2 RNA guide
gaaggaggauaaaaauggguu

SEQ ID NO: 101310 - RNA, 21 nt, Artificial Sequence
  LRRK2 RNA guide
gaagggagaaugaguugaagu

SEQ ID NO: 101311 - RNA, 21 nt, Artificial Sequence
  LRRK2 RNA guide
gaauaaccaagaacucucggc

SEQ ID NO: 101312 - RNA, 21 nt, Artificial Sequence
  LRRK2 RNA guide
gaauagucaagucuaaacacu

SEQ ID NO: 101313 - RNA, 21 nt, Artificial Sequence
  LRRK2 RNA guide
gaauaguuuggaaaaggggaa

SEQ ID NO: 101314 - RNA, 21 nt, Artificial Sequence
  LRRK2 RNA guide
gaaugaguugaagugaaaaca

SEQ ID NO: 101315 - RNA, 21 nt, Artificial Sequence
  LRRK2 RNA guide
gaauucaucuugccaauaacg

SEQ ID NO: 101316 - RNA, 21 nt, Artificial Sequence
  LRRK2 RNA guide
gaauucauuaguguuuagacu

SEQ ID NO: 101317 - RNA, 21 nt, Artificial Sequence
  LRRK2 RNA guide
gaauuuuaaaaagugcugaac

SEQ ID NO: 101318 - RNA, 21 nt, Artificial Sequence
  LRRK2 RNA guide
gacacucagggaacacauacu

SEQ ID NO: 101319 - RNA, 21 nt, Artificial Sequence
  LRRK2 RNA guide
gacaugcucuguauugggaag

SEQ ID NO: 101320 - RNA, 21 nt, Artificial Sequence
  LRRK2 RNA guide
gacguuuuacuggcaauguua

SEQ ID NO: 101321 - RNA, 21 nt, Artificial Sequence
  LRRK2 RNA guide
gacuaaaaccgaacccauuuu

SEQ ID NO: 101322 - RNA, 21 nt, Artificial Sequence
  LRRK2 RNA guide
gacuauuccaaguaucuuccc

SEQ ID NO: 101323 - RNA, 21 nt, Artificial Sequence
  LRRK2 RNA guide
gacugugauuuuaagauggga

SEQ ID NO: 101324 - RNA, 21 nt, Artificial Sequence
  LRRK2 RNA guide
gacuugacuauuccaaguauc

SEQ ID NO: 101325 - RNA, 21 nt, Artificial Sequence
  LRRK2 RNA guide
gagaaugaguugaagugaaaa

SEQ ID NO: 101326 - RNA, 21 nt, Artificial Sequence
  LRRK2 RNA guide
gagacguuuuacuggcaaugu

SEQ ID NO: 101327 - RNA, 21 nt, Artificial Sequence
  LRRK2 RNA guide
gagacuaaaaccgaacccauu

SEQ ID NO: 101328 - RNA, 21 nt, Artificial Sequence
  LRRK2 RNA guide
gagaguucuugguuauuccca

SEQ ID NO: 101329 - RNA, 21 nt, Artificial Sequence
  LRRK2 RNA guide
gagcauguccuagaugagaag

SEQ ID NO: 101330 - RNA, 21 nt, Artificial Sequence
  LRRK2 RNA guide
gagccccaguauguguucccu

SEQ ID NO: 101331 - RNA, 21 nt, Artificial Sequence
  LRRK2 RNA guide
gaggaaccucugacugugauu

SEQ ID NO: 101332 - RNA, 21 nt, Artificial Sequence
  LRRK2 RNA guide
gaggauaaaaauggguucggu

SEQ ID NO: 101333 - RNA, 21 nt, Artificial Sequence
  LRRK2 RNA guide
gagguuccucaagccaaauuu

SEQ ID NO: 101334 - RNA, 21 nt, Artificial Sequence
  LRRK2 RNA guide
gaguucuugguuauucccaaa

SEQ ID NO: 101335 - RNA, 21 nt, Artificial Sequence
  LRRK2 RNA guide
gaguugaagugaaaacaaugc

SEQ ID NO: 101336 - RNA, 21 nt, Artificial Sequence
  LRRK2 RNA guide
gaguuugcuagugacaaaguu

SEQ ID NO: 101337 - RNA, 21 nt, Artificial Sequence
  LRRK2 RNA guide
gauaaaaauggguucgguuuu

SEQ ID NO: 101338 - RNA, 21 nt, Artificial Sequence
  LRRK2 RNA guide
gauaaaaugcaacuuugucac

SEQ ID NO: 101339 - RNA, 21 nt, Artificial Sequence
  LRRK2 RNA guide
gauacuuggaauagucaaguc

SEQ ID NO: 101340 - RNA, 21 nt, Artificial Sequence
  LRRK2 RNA guide
gaugaagagccccaguaugug

SEQ ID NO: 101341 - RNA, 21 nt, Artificial Sequence
  LRRK2 RNA guide
gaugaauucauuaguguuuag

SEQ ID NO: 101342 - RNA, 21 nt, Artificial Sequence
  LRRK2 RNA guide
gaugagaagauuaugaauagu

SEQ ID NO: 101343 - RNA, 21 nt, Artificial Sequence
  LRRK2 RNA guide
gaugggaauauuguuaaauca

SEQ ID NO: 101344 - RNA, 21 nt, Artificial Sequence
  LRRK2 RNA guide
gauggugguagaaggaggaua

SEQ ID NO: 101345 - RNA, 21 nt, Artificial Sequence
  LRRK2 RNA guide
gauuaugaauaguuuggaaaa

SEQ ID NO: 101346 - RNA, 21 nt, Artificial Sequence
  LRRK2 RNA guide
gauuucuagccuuuaguugua

SEQ ID NO: 101347 - RNA, 21 nt, Artificial Sequence
  LRRK2 RNA guide
gcaaacucuuguagaguucag

SEQ ID NO: 101348 - RNA, 21 nt, Artificial Sequence
  LRRK2 RNA guide
gcaacuuugucacuagcaaac

SEQ ID NO: 101349 - RNA, 21 nt, Artificial Sequence
  LRRK2 RNA guide
gcaagaugaauucauuagugu

SEQ ID NO: 101350 - RNA, 21 nt, Artificial Sequence
  LRRK2 RNA guide
gcaauguaaacgggaugaaga

SEQ ID NO: 101351 - RNA, 21 nt, Artificial Sequence
  LRRK2 RNA guide
gcaauguuaauauagccgaga

SEQ ID NO: 101352 - RNA, 21 nt, Artificial Sequence
  LRRK2 RNA guide
gcauguccuagaugagaagau

SEQ ID NO: 101353 - RNA, 21 nt, Artificial Sequence
  LRRK2 RNA guide
gcauuguuuucacuucaacuc

SEQ ID NO: 101354 - RNA, 21 nt, Artificial Sequence
  LRRK2 RNA guide
gccaaauuuugggaauaacca

SEQ ID NO: 101355 - RNA, 21 nt, Artificial Sequence
  LRRK2 RNA guide
gccaauaacgagacuaaaacc

SEQ ID NO: 101356 - RNA, 21 nt, Artificial Sequence
  LRRK2 RNA guide
gccaguaaaacgucuccuucc

SEQ ID NO: 101357 - RNA, 21 nt, Artificial Sequence
  LRRK2 RNA guide
gccccaguauguguucccuga

SEQ ID NO: 101358 - RNA, 21 nt, Artificial Sequence
  LRRK2 RNA guide
gccgagaguucuugguuauuc

SEQ ID NO: 101359 - RNA, 21 nt, Artificial Sequence
  LRRK2 RNA guide
gcguaaugauuuaacaauauu

SEQ ID NO: 101360 - RNA, 21 nt, Artificial Sequence
  LRRK2 RNA guide
gcuagugacaaaguugcauuu

SEQ ID NO: 101361 - RNA, 21 nt, Artificial Sequence
  LRRK2 RNA guide
gcuauauuaacauugccagua

SEQ ID NO: 101362 - RNA, 21 nt, Artificial Sequence
  LRRK2 RNA guide
gcucuguauugggaagauacu

SEQ ID NO: 101363 - RNA, 21 nt, Artificial Sequence
  LRRK2 RNA guide
gcucuucaucccguuuacauu

SEQ ID NO: 101364 - RNA, 21 nt, Artificial Sequence
  LRRK2 RNA guide
gcugaacucuacaagaguuug

SEQ ID NO: 101365 - RNA, 21 nt, Artificial Sequence
  LRRK2 RNA guide
gcuugaggaaccucugacugu

SEQ ID NO: 101366 - RNA, 21 nt, Artificial Sequence
  LRRK2 RNA guide
ggaaaaggggaauaauuaaua

SEQ ID NO: 101367 - RNA, 21 nt, Artificial Sequence
  LRRK2 RNA guide
ggaacacauacuggggcucuu

SEQ ID NO: 101368 - RNA, 21 nt, Artificial Sequence
  LRRK2 RNA guide
ggaaccucugacugugauuuu

SEQ ID NO: 101369 - RNA, 21 nt, Artificial Sequence
  LRRK2 RNA guide
ggaagauacuuggaauaguca

SEQ ID NO: 101370 - RNA, 21 nt, Artificial Sequence
  LRRK2 RNA guide
ggaaggagacguuuuacuggc

SEQ ID NO: 101371 - RNA, 21 nt, Artificial Sequence
  LRRK2 RNA guide
ggaauaaccaagaacucucgg

SEQ ID NO: 101372 - RNA, 21 nt, Artificial Sequence
  LRRK2 RNA guide
ggaauagucaagucuaaacac

SEQ ID NO: 101373 - RNA, 21 nt, Artificial Sequence
  LRRK2 RNA guide
ggacaugcucuguauugggaa

SEQ ID NO: 101374 - RNA, 21 nt, Artificial Sequence
  LRRK2 RNA guide
ggagaaugaguugaagugaaa

SEQ ID NO: 101375 - RNA, 21 nt, Artificial Sequence
  LRRK2 RNA guide
ggagacguuuuacuggcaaug

SEQ ID NO: 101376 - RNA, 21 nt, Artificial Sequence
  LRRK2 RNA guide
ggaggauaaaaauggguucgg

SEQ ID NO: 101377 - RNA, 21 nt, Artificial Sequence
  LRRK2 RNA guide
ggauaaaaauggguucgguuu

SEQ ID NO: 101378 - RNA, 21 nt, Artificial Sequence
  LRRK2 RNA guide
ggaugaagagccccaguaugu

SEQ ID NO: 101379 - RNA, 21 nt, Artificial Sequence
  LRRK2 RNA guide
ggauggugguagaaggaggau

SEQ ID NO: 101380 - RNA, 21 nt, Artificial Sequence
  LRRK2 RNA guide
ggcaagaugaauucauuagug

SEQ ID NO: 101381 - RNA, 21 nt, Artificial Sequence
  LRRK2 RNA guide
ggcaauguuaauauagccgag

SEQ ID NO: 101382 - RNA, 21 nt, Artificial Sequence
  LRRK2 RNA guide
ggcauuguuuucacuucaacu

SEQ ID NO: 101383 - RNA, 21 nt, Artificial Sequence
  LRRK2 RNA guide
ggcuauauuaacauugccagu

SEQ ID NO: 101384 - RNA, 21 nt, Artificial Sequence
  LRRK2 RNA guide
ggcucuucaucccguuuacau

SEQ ID NO: 101385 - RNA, 21 nt, Artificial Sequence
  LRRK2 RNA guide
ggcuugaggaaccucugacug

SEQ ID NO: 101386 - RNA, 21 nt, Artificial Sequence
  LRRK2 RNA guide
gggaacacauacuggggcucu

SEQ ID NO: 101387 - RNA, 21 nt, Artificial Sequence
  LRRK2 RNA guide
gggaagauacuuggaauaguc

SEQ ID NO: 101388 - RNA, 21 nt, Artificial Sequence
  LRRK2 RNA guide
gggaauaaccaagaacucucg

SEQ ID NO: 101389 - RNA, 21 nt, Artificial Sequence
  LRRK2 RNA guide
gggaauauuguuaaaucauua

SEQ ID NO: 101390 - RNA, 21 nt, Artificial Sequence
  LRRK2 RNA guide
gggagaaugaguugaagugaa

SEQ ID NO: 101391 - RNA, 21 nt, Artificial Sequence
  LRRK2 RNA guide
gggaugaagagccccaguaug

SEQ ID NO: 101392 - RNA, 21 nt, Artificial Sequence
  LRRK2 RNA guide
gggcucuucaucccguuuaca

SEQ ID NO: 101393 - RNA, 21 nt, Artificial Sequence
  LRRK2 RNA guide
ggggcucuucaucccguuuac

SEQ ID NO: 101394 - RNA, 21 nt, Artificial Sequence
  LRRK2 RNA guide
ggguucgguuuuagucucguu

SEQ ID NO: 101395 - RNA, 21 nt, Artificial Sequence
  LRRK2 RNA guide
gguagaaggaggauaaaaaug

SEQ ID NO: 101396 - RNA, 21 nt, Artificial Sequence
  LRRK2 RNA guide
gguauacuacaacuaaaggcu

SEQ ID NO: 101397 - RNA, 21 nt, Artificial Sequence
  LRRK2 RNA guide
ggugguagaaggaggauaaaa

SEQ ID NO: 101398 - RNA, 21 nt, Artificial Sequence
  LRRK2 RNA guide
gguuauucccaaaauuuggcu

SEQ ID NO: 101399 - RNA, 21 nt, Artificial Sequence
  LRRK2 RNA guide
gguuccucaagccaaauuuug

SEQ ID NO: 101400 - RNA, 21 nt, Artificial Sequence
  LRRK2 RNA guide
gguucgguuuuagucucguua

SEQ ID NO: 101401 - RNA, 21 nt, Artificial Sequence
  LRRK2 RNA guide
gguuuuagucucguuauuggc

SEQ ID NO: 101402 - RNA, 21 nt, Artificial Sequence
  LRRK2 RNA guide
guaaaacgucuccuuccaaac

SEQ ID NO: 101403 - RNA, 21 nt, Artificial Sequence
  LRRK2 RNA guide
guaaacgggaugaagagcccc

SEQ ID NO: 101404 - RNA, 21 nt, Artificial Sequence
  LRRK2 RNA guide
guaaaggcauuguuuucacuu

SEQ ID NO: 101405 - RNA, 21 nt, Artificial Sequence
  LRRK2 RNA guide
guaacuuuauaaaaccaacag

SEQ ID NO: 101406 - RNA, 21 nt, Artificial Sequence
  LRRK2 RNA guide
guagaaggaggauaaaaaugg

SEQ ID NO: 101407 - RNA, 21 nt, Artificial Sequence
  LRRK2 RNA guide
guagaguucagcacuuuuuaa

SEQ ID NO: 101408 - RNA, 21 nt, Artificial Sequence
  LRRK2 RNA guide
guauacuacaacuaaaggcua

SEQ ID NO: 101409 - RNA, 21 nt, Artificial Sequence
  LRRK2 RNA guide
guaucuucccaauacagagca

SEQ ID NO: 101410 - RNA, 21 nt, Artificial Sequence
  LRRK2 RNA guide
guauggauggugguagaagga

SEQ ID NO: 101411 - RNA, 21 nt, Artificial Sequence
  LRRK2 RNA guide
guauguguucccugagugucu

SEQ ID NO: 101412 - RNA, 21 nt, Artificial Sequence
  LRRK2 RNA guide
guauugggaagauacuuggaa

SEQ ID NO: 101413 - RNA, 21 nt, Artificial Sequence
  LRRK2 RNA guide
gucaagucuaaacacuaauga

SEQ ID NO: 101414 - RNA, 21 nt, Artificial Sequence
  LRRK2 RNA guide
gucacuagcaaacucuuguag

SEQ ID NO: 101415 - RNA, 21 nt, Artificial Sequence
  LRRK2 RNA guide
gucagagguuccucaagccaa

SEQ ID NO: 101416 - RNA, 21 nt, Artificial Sequence
  LRRK2 RNA guide
guccuagaugagaagauuaug

SEQ ID NO: 101417 - RNA, 21 nt, Artificial Sequence
  LRRK2 RNA guide
gucuaaacacuaaugaauuca

SEQ ID NO: 101418 - RNA, 21 nt, Artificial Sequence
  LRRK2 RNA guide
gucuccuuccaaacagaaggg

SEQ ID NO: 101419 - RNA, 21 nt, Artificial Sequence
  LRRK2 RNA guide
gucucguuauuggcaagauga

SEQ ID NO: 101420 - RNA, 21 nt, Artificial Sequence
  LRRK2 RNA guide
gugacaaaguugcauuuuauc

SEQ ID NO: 101421 - RNA, 21 nt, Artificial Sequence
  LRRK2 RNA guide
gugauaaaaugcaacuuuguc

SEQ ID NO: 101422 - RNA, 21 nt, Artificial Sequence
  LRRK2 RNA guide
gugcugaacucuacaagaguu

SEQ ID NO: 101423 - RNA, 21 nt, Artificial Sequence
  LRRK2 RNA guide
gugguagaaggaggauaaaaa

SEQ ID NO: 101424 - RNA, 21 nt, Artificial Sequence
  LRRK2 RNA guide
guguucccugagugucuuuaa

SEQ ID NO: 101425 - RNA, 21 nt, Artificial Sequence
  LRRK2 RNA guide
guguuuagacuugacuauucc

SEQ ID NO: 101426 - RNA, 21 nt, Artificial Sequence
  LRRK2 RNA guide
guuaaaucauuacgcaaugua

SEQ ID NO: 101427 - RNA, 21 nt, Artificial Sequence
  LRRK2 RNA guide
guuaauauagccgagaguucu

SEQ ID NO: 101428 - RNA, 21 nt, Artificial Sequence
  LRRK2 RNA guide
guuacuucuuaaagacacuca

SEQ ID NO: 101429 - RNA, 21 nt, Artificial Sequence
  LRRK2 RNA guide
guuauucccaaaauuuggcuu

SEQ ID NO: 101430 - RNA, 21 nt, Artificial Sequence
  LRRK2 RNA guide
guuauuggcaagaugaauuca

SEQ ID NO: 101431 - RNA, 21 nt, Artificial Sequence
  LRRK2 RNA guide
guucccugagugucuuuaaga

SEQ ID NO: 101432 - RNA, 21 nt, Artificial Sequence
  LRRK2 RNA guide
guuccucaagccaaauuuugg

SEQ ID NO: 101433 - RNA, 21 nt, Artificial Sequence
  LRRK2 RNA guide
guucgguuuuagucucguuau

SEQ ID NO: 101434 - RNA, 21 nt, Artificial Sequence
  LRRK2 RNA guide
guucuugguuauucccaaaau

SEQ ID NO: 101435 - RNA, 21 nt, Artificial Sequence
  LRRK2 RNA guide
guuuagacuugacuauuccaa

SEQ ID NO: 101436 - RNA, 21 nt, Artificial Sequence
  LRRK2 RNA guide
guuugcuagugacaaaguugc

SEQ ID NO: 101437 - RNA, 21 nt, Artificial Sequence
  LRRK2 RNA guide
guuuggaaaaggggaauaauu

SEQ ID NO: 101438 - RNA, 21 nt, Artificial Sequence
  LRRK2 RNA guide
guuuggaaggagacguuuuac

SEQ ID NO: 101439 - RNA, 21 nt, Artificial Sequence
  LRRK2 RNA guide
guuuuacuggcaauguuaaua

SEQ ID NO: 101440 - RNA, 21 nt, Artificial Sequence
  LRRK2 RNA guide
guuuuagucucguuauuggca

SEQ ID NO: 101441 - RNA, 21 nt, Artificial Sequence
  LRRK2 RNA guide
guuuucacuucaacucauucu

SEQ ID NO: 101442 - RNA, 21 nt, Artificial Sequence
  LRRK2 RNA guide
uaaaaagugcugaacucuaca

SEQ ID NO: 101443 - RNA, 21 nt, Artificial Sequence
  LRRK2 RNA guide
uaaaaauggguucgguuuuag

SEQ ID NO: 101444 - RNA, 21 nt, Artificial Sequence
  LRRK2 RNA guide
uaaaaccaacaguauggaugg

SEQ ID NO: 101445 - RNA, 21 nt, Artificial Sequence
  LRRK2 RNA guide
uaaaaccgaacccauuuuuau

SEQ ID NO: 101446 - RNA, 21 nt, Artificial Sequence
  LRRK2 RNA guide
uaaaacgucuccuuccaaaca

SEQ ID NO: 101447 - RNA, 21 nt, Artificial Sequence
  LRRK2 RNA guide
uaaaaucacagucagagguuc

SEQ ID NO: 101448 - RNA, 21 nt, Artificial Sequence
  LRRK2 RNA guide
uaaaaugcaacuuugucacua

SEQ ID NO: 101449 - RNA, 21 nt, Artificial Sequence
  LRRK2 RNA guide
uaaacacuaaugaauucaucu

SEQ ID NO: 101450 - RNA, 21 nt, Artificial Sequence
  LRRK2 RNA guide
uaaacgggaugaagagcccca

SEQ ID NO: 101451 - RNA, 21 nt, Artificial Sequence
  LRRK2 RNA guide
uaaagacacucagggaacaca

SEQ ID NO: 101452 - RNA, 21 nt, Artificial Sequence
  LRRK2 RNA guide
uaaaggcauuguuuucacuuc

SEQ ID NO: 101453 - RNA, 21 nt, Artificial Sequence
  LRRK2 RNA guide
uaaaguuacuucuuaaagaca

SEQ ID NO: 101454 - RNA, 21 nt, Artificial Sequence
  LRRK2 RNA guide
uaaaucauuacgcaauguaaa

SEQ ID NO: 101455 - RNA, 21 nt, Artificial Sequence
  LRRK2 RNA guide
uaacauugccaguaaaacguc

SEQ ID NO: 101456 - RNA, 21 nt, Artificial Sequence
  LRRK2 RNA guide
uaaccaagaacucucggcuau

SEQ ID NO: 101457 - RNA, 21 nt, Artificial Sequence
  LRRK2 RNA guide
uaacgagacuaaaaccgaacc

SEQ ID NO: 101458 - RNA, 21 nt, Artificial Sequence
  LRRK2 RNA guide
uaauauagccgagaguucuug

SEQ ID NO: 101459 - RNA, 21 nt, Artificial Sequence
  LRRK2 RNA guide
uaaucuucucaucuaggacau

SEQ ID NO: 101460 - RNA, 21 nt, Artificial Sequence
  LRRK2 RNA guide
uaaugaauucaucuugccaau

SEQ ID NO: 101461 - RNA, 21 nt, Artificial Sequence
  LRRK2 RNA guide
uacaacuaaaggcuagaaauc

SEQ ID NO: 101462 - RNA, 21 nt, Artificial Sequence
  LRRK2 RNA guide
uacaagaguuugcuagugaca

SEQ ID NO: 101463 - RNA, 21 nt, Artificial Sequence
  LRRK2 RNA guide
uacagagcauguccuagauga

SEQ ID NO: 101464 - RNA, 21 nt, Artificial Sequence
  LRRK2 RNA guide
uaccaccauccauacuguugg

SEQ ID NO: 101465 - RNA, 21 nt, Artificial Sequence
  LRRK2 RNA guide
uacgcaauguaaacgggauga

SEQ ID NO: 101466 - RNA, 21 nt, Artificial Sequence
  LRRK2 RNA guide
uacuacaacuaaaggcuagaa

SEQ ID NO: 101467 - RNA, 21 nt, Artificial Sequence
  LRRK2 RNA guide
uacuggcaauguuaauauagc

SEQ ID NO: 101468 - RNA, 21 nt, Artificial Sequence
  LRRK2 RNA guide
uacuggggcucuucaucccgu

SEQ ID NO: 101469 - RNA, 21 nt, Artificial Sequence
  LRRK2 RNA guide
uacuucuuaaagacacucagg

SEQ ID NO: 101470 - RNA, 21 nt, Artificial Sequence
  LRRK2 RNA guide
uacuuggaauagucaagucua

SEQ ID NO: 101471 - RNA, 21 nt, Artificial Sequence
  LRRK2 RNA guide
uagaaggaggauaaaaauggg

SEQ ID NO: 101472 - RNA, 21 nt, Artificial Sequence
  LRRK2 RNA guide
uagacuugacuauuccaagua

SEQ ID NO: 101473 - RNA, 21 nt, Artificial Sequence
  LRRK2 RNA guide
uagcaaacucuuguagaguuc

SEQ ID NO: 101474 - RNA, 21 nt, Artificial Sequence
  LRRK2 RNA guide
uagccgagaguucuugguuau

SEQ ID NO: 101475 - RNA, 21 nt, Artificial Sequence
  LRRK2 RNA guide
uagccuuuaguuguaguauac

SEQ ID NO: 101476 - RNA, 21 nt, Artificial Sequence
  LRRK2 RNA guide
uaggacaugcucuguauuggg

SEQ ID NO: 101477 - RNA, 21 nt, Artificial Sequence
  LRRK2 RNA guide
uagucucguuauuggcaagau

SEQ ID NO: 101478 - RNA, 21 nt, Artificial Sequence
  LRRK2 RNA guide
uagugacaaaguugcauuuua

SEQ ID NO: 101479 - RNA, 21 nt, Artificial Sequence
  LRRK2 RNA guide
uagugauaaaaugcaacuuug

SEQ ID NO: 101480 - RNA, 21 nt, Artificial Sequence
  LRRK2 RNA guide
uaguguuuagacuugacuauu

SEQ ID NO: 101481 - RNA, 21 nt, Artificial Sequence
  LRRK2 RNA guide
uauaaaaccaacaguauggau

SEQ ID NO: 101482 - RNA, 21 nt, Artificial Sequence
  LRRK2 RNA guide
uauacuacaacuaaaggcuag

SEQ ID NO: 101483 - RNA, 21 nt, Artificial Sequence
  LRRK2 RNA guide
uauagccgagaguucuugguu

SEQ ID NO: 101484 - RNA, 21 nt, Artificial Sequence
  LRRK2 RNA guide
uauauuaacauugccaguaaa

SEQ ID NO: 101485 - RNA, 21 nt, Artificial Sequence
  LRRK2 RNA guide
uauccuccuucuaccaccauc

SEQ ID NO: 101486 - RNA, 21 nt, Artificial Sequence
  LRRK2 RNA guide
uaucuucccaauacagagcau

SEQ ID NO: 101487 - RNA, 21 nt, Artificial Sequence
  LRRK2 RNA guide
uaugaauaguuuggaaaaggg

SEQ ID NO: 101488 - RNA, 21 nt, Artificial Sequence
  LRRK2 RNA guide
uauggauggugguagaaggag

SEQ ID NO: 101489 - RNA, 21 nt, Artificial Sequence
  LRRK2 RNA guide
uauguguucccugagugucuu

SEQ ID NO: 101490 - RNA, 21 nt, Artificial Sequence
  LRRK2 RNA guide
uauuaacauugccaguaaaac

SEQ ID NO: 101491 - RNA, 21 nt, Artificial Sequence
  LRRK2 RNA guide
uauucauaaucuucucaucua

SEQ ID NO: 101492 - RNA, 21 nt, Artificial Sequence
  LRRK2 RNA guide
uauuccaaguaucuucccaau

SEQ ID NO: 101493 - RNA, 21 nt, Artificial Sequence
  LRRK2 RNA guide
uauucccaaaauuuggcuuga

SEQ ID NO: 101494 - RNA, 21 nt, Artificial Sequence
  LRRK2 RNA guide
uauucccaucuuaaaaucaca

SEQ ID NO: 101495 - RNA, 21 nt, Artificial Sequence
  LRRK2 RNA guide
uauuccccuuuuccaaacuau

SEQ ID NO: 101496 - RNA, 21 nt, Artificial Sequence
  LRRK2 RNA guide
uauuggcaagaugaauucauu

SEQ ID NO: 101497 - RNA, 21 nt, Artificial Sequence
  LRRK2 RNA guide
uauugggaagauacuuggaau

SEQ ID NO: 101498 - RNA, 21 nt, Artificial Sequence
  LRRK2 RNA guide
ucaaagauuucuagccuuuag

SEQ ID NO: 101499 - RNA, 21 nt, Artificial Sequence
  LRRK2 RNA guide
ucaacucauucucccuucugu

SEQ ID NO: 101500 - RNA, 21 nt, Artificial Sequence
  LRRK2 RNA guide
ucaagccaaauuuugggaaua

SEQ ID NO: 101501 - RNA, 21 nt, Artificial Sequence
  LRRK2 RNA guide
ucacagucagagguuccucaa

SEQ ID NO: 101502 - RNA, 21 nt, Artificial Sequence
  LRRK2 RNA guide
ucacuagcaaacucuuguaga

SEQ ID NO: 101503 - RNA, 21 nt, Artificial Sequence
  LRRK2 RNA guide
ucacuauuaauuauuccccuu

SEQ ID NO: 101504 - RNA, 21 nt, Artificial Sequence
  LRRK2 RNA guide
ucacuucaacucauucucccu

SEQ ID NO: 101505 - RNA, 21 nt, Artificial Sequence
  LRRK2 RNA guide
ucagagguuccucaagccaaa

SEQ ID NO: 101506 - RNA, 21 nt, Artificial Sequence
  LRRK2 RNA guide
ucagggaacacauacuggggc

SEQ ID NO: 101507 - RNA, 21 nt, Artificial Sequence
  LRRK2 RNA guide
ucauaaucuucucaucuagga

SEQ ID NO: 101508 - RNA, 21 nt, Artificial Sequence
  LRRK2 RNA guide
ucaucccguuuacauugcgua

SEQ ID NO: 101509 - RNA, 21 nt, Artificial Sequence
  LRRK2 RNA guide
ucaucuaggacaugcucugua

SEQ ID NO: 101510 - RNA, 21 nt, Artificial Sequence
  LRRK2 RNA guide
ucaucuugccaauaacgagac

SEQ ID NO: 101511 - RNA, 21 nt, Artificial Sequence
  LRRK2 RNA guide
ucauuacgcaauguaaacggg

SEQ ID NO: 101512 - RNA, 21 nt, Artificial Sequence
  LRRK2 RNA guide
ucauuaguguuuagacuugac

SEQ ID NO: 101513 - RNA, 21 nt, Artificial Sequence
  LRRK2 RNA guide
ucauucucccuucuguuugga

SEQ ID NO: 101514 - RNA, 21 nt, Artificial Sequence
  LRRK2 RNA guide
uccaaacagaagggagaauga

SEQ ID NO: 101515 - RNA, 21 nt, Artificial Sequence
  LRRK2 RNA guide
uccaaacuauucauaaucuuc

SEQ ID NO: 101516 - RNA, 21 nt, Artificial Sequence
  LRRK2 RNA guide
uccaaguaucuucccaauaca

SEQ ID NO: 101517 - RNA, 21 nt, Artificial Sequence
  LRRK2 RNA guide
ucccaaaauuuggcuugagga

SEQ ID NO: 101518 - RNA, 21 nt, Artificial Sequence
  LRRK2 RNA guide
ucccaauacagagcauguccu

SEQ ID NO: 101519 - RNA, 21 nt, Artificial Sequence
  LRRK2 RNA guide
ucccaucuuaaaaucacaguc

SEQ ID NO: 101520 - RNA, 21 nt, Artificial Sequence
  LRRK2 RNA guide
uccccuuuuccaaacuauuca

SEQ ID NO: 101521 - RNA, 21 nt, Artificial Sequence
  LRRK2 RNA guide
ucccguuuacauugcguaaug

SEQ ID NO: 101522 - RNA, 21 nt, Artificial Sequence
  LRRK2 RNA guide
ucccugagugucuuuaagaag

SEQ ID NO: 101523 - RNA, 21 nt, Artificial Sequence
  LRRK2 RNA guide
ucccuucuguuuggaaggaga

SEQ ID NO: 101524 - RNA, 21 nt, Artificial Sequence
  LRRK2 RNA guide
uccuagaugagaagauuauga

SEQ ID NO: 101525 - RNA, 21 nt, Artificial Sequence
  LRRK2 RNA guide
uccucaagccaaauuuuggga

SEQ ID NO: 101526 - RNA, 21 nt, Artificial Sequence
  LRRK2 RNA guide
uccuccuucuaccaccaucca

SEQ ID NO: 101527 - RNA, 21 nt, Artificial Sequence
  LRRK2 RNA guide
uccuuccaaacagaagggaga

SEQ ID NO: 101528 - RNA, 21 nt, Artificial Sequence
  LRRK2 RNA guide
uccuucuaccaccauccauac

SEQ ID NO: 101529 - RNA, 21 nt, Artificial Sequence
  LRRK2 RNA guide
ucggcuauauuaacauugcca

SEQ ID NO: 101530 - RNA, 21 nt, Artificial Sequence
  LRRK2 RNA guide
ucgguuuuagucucguuauug

SEQ ID NO: 101531 - RNA, 21 nt, Artificial Sequence
  LRRK2 RNA guide
ucguuauuggcaagaugaauu

SEQ ID NO: 101532 - RNA, 21 nt, Artificial Sequence
  LRRK2 RNA guide
ucuaaacacuaaugaauucau

SEQ ID NO: 101533 - RNA, 21 nt, Artificial Sequence
  LRRK2 RNA guide
ucuacaagaguuugcuaguga

SEQ ID NO: 101534 - RNA, 21 nt, Artificial Sequence
  LRRK2 RNA guide
ucuaccaccauccauacuguu

SEQ ID NO: 101535 - RNA, 21 nt, Artificial Sequence
  LRRK2 RNA guide
ucuagccuuuaguuguaguau

SEQ ID NO: 101536 - RNA, 21 nt, Artificial Sequence
  LRRK2 RNA guide
ucuaggacaugcucuguauug

SEQ ID NO: 101537 - RNA, 21 nt, Artificial Sequence
  LRRK2 RNA guide
ucucaucuaggacaugcucug

SEQ ID NO: 101538 - RNA, 21 nt, Artificial Sequence
  LRRK2 RNA guide
ucucccuucuguuuggaagga

SEQ ID NO: 101539 - RNA, 21 nt, Artificial Sequence
  LRRK2 RNA guide
ucuccuuccaaacagaaggga

SEQ ID NO: 101540 - RNA, 21 nt, Artificial Sequence
  LRRK2 RNA guide
ucucggcuauauuaacauugc

SEQ ID NO: 101541 - RNA, 21 nt, Artificial Sequence
  LRRK2 RNA guide
ucucguuauuggcaagaugaa

SEQ ID NO: 101542 - RNA, 21 nt, Artificial Sequence
  LRRK2 RNA guide
ucugacugugauuuuaagaug

SEQ ID NO: 101543 - RNA, 21 nt, Artificial Sequence
  LRRK2 RNA guide
ucuguauugggaagauacuug

SEQ ID NO: 101544 - RNA, 21 nt, Artificial Sequence
  LRRK2 RNA guide
ucuguuuggaaggagacguuu

SEQ ID NO: 101545 - RNA, 21 nt, Artificial Sequence
  LRRK2 RNA guide
ucuuaaaaucacagucagagg

SEQ ID NO: 101546 - RNA, 21 nt, Artificial Sequence
  LRRK2 RNA guide
ucuuaaagacacucagggaac

SEQ ID NO: 101547 - RNA, 21 nt, Artificial Sequence
  LRRK2 RNA guide
ucuucaucccguuuacauugc

SEQ ID NO: 101548 - RNA, 21 nt, Artificial Sequence
  LRRK2 RNA guide
ucuucccaauacagagcaugu

SEQ ID NO: 101549 - RNA, 21 nt, Artificial Sequence
  LRRK2 RNA guide
ucuucucaucuaggacaugcu

SEQ ID NO: 101550 - RNA, 21 nt, Artificial Sequence
  LRRK2 RNA guide
ucuugccaauaacgagacuaa

SEQ ID NO: 101551 - RNA, 21 nt, Artificial Sequence
  LRRK2 RNA guide
ucuugguuauucccaaaauuu

SEQ ID NO: 101552 - RNA, 21 nt, Artificial Sequence
  LRRK2 RNA guide
ucuuguagaguucagcacuuu

SEQ ID NO: 101553 - RNA, 21 nt, Artificial Sequence
  LRRK2 RNA guide
ugaacucuacaagaguuugcu

SEQ ID NO: 101554 - RNA, 21 nt, Artificial Sequence
  LRRK2 RNA guide
ugaagagccccaguauguguu

SEQ ID NO: 101555 - RNA, 21 nt, Artificial Sequence
  LRRK2 RNA guide
ugaauaguuuggaaaagggga

SEQ ID NO: 101556 - RNA, 21 nt, Artificial Sequence
  LRRK2 RNA guide
ugaauucaucuugccaauaac

SEQ ID NO: 101557 - RNA, 21 nt, Artificial Sequence
  LRRK2 RNA guide
ugaauucauuaguguuuagac

SEQ ID NO: 101558 - RNA, 21 nt, Artificial Sequence
  LRRK2 RNA guide
ugacuauuccaaguaucuucc

SEQ ID NO: 101559 - RNA, 21 nt, Artificial Sequence
  LRRK2 RNA guide
ugacugugauuuuaagauggg

SEQ ID NO: 101560 - RNA, 21 nt, Artificial Sequence
  LRRK2 RNA guide
ugaggaaccucugacugugau

SEQ ID NO: 101561 - RNA, 21 nt, Artificial Sequence
  LRRK2 RNA guide
ugaguugaagugaaaacaaug

SEQ ID NO: 101562 - RNA, 21 nt, Artificial Sequence
  LRRK2 RNA guide
ugauaaaaugcaacuuuguca

SEQ ID NO: 101563 - RNA, 21 nt, Artificial Sequence
  LRRK2 RNA guide
ugcaacuuugucacuagcaaa

SEQ ID NO: 101564 - RNA, 21 nt, Artificial Sequence
  LRRK2 RNA guide
ugccaauaacgagacuaaaac

SEQ ID NO: 101565 - RNA, 21 nt, Artificial Sequence
  LRRK2 RNA guide
ugccaguaaaacgucuccuuc

SEQ ID NO: 101566 - RNA, 21 nt, Artificial Sequence
  LRRK2 RNA guide
ugcguaaugauuuaacaauau

SEQ ID NO: 101567 - RNA, 21 nt, Artificial Sequence
  LRRK2 RNA guide
ugcuagugacaaaguugcauu

SEQ ID NO: 101568 - RNA, 21 nt, Artificial Sequence
  LRRK2 RNA guide
ugcucuguauugggaagauac

SEQ ID NO: 101569 - RNA, 21 nt, Artificial Sequence
  LRRK2 RNA guide
ugcugaacucuacaagaguuu

SEQ ID NO: 101570 - RNA, 21 nt, Artificial Sequence
  LRRK2 RNA guide
uggaaaaggggaauaauuaau

SEQ ID NO: 101571 - RNA, 21 nt, Artificial Sequence
  LRRK2 RNA guide
uggaaggagacguuuuacugg

SEQ ID NO: 101572 - RNA, 21 nt, Artificial Sequence
  LRRK2 RNA guide
uggaauagucaagucuaaaca

SEQ ID NO: 101573 - RNA, 21 nt, Artificial Sequence
  LRRK2 RNA guide
uggauggugguagaaggagga

SEQ ID NO: 101574 - RNA, 21 nt, Artificial Sequence
  LRRK2 RNA guide
uggcaagaugaauucauuagu

SEQ ID NO: 101575 - RNA, 21 nt, Artificial Sequence
  LRRK2 RNA guide
uggcaauguuaauauagccga

SEQ ID NO: 101576 - RNA, 21 nt, Artificial Sequence
  LRRK2 RNA guide
uggcuugaggaaccucugacu

SEQ ID NO: 101577 - RNA, 21 nt, Artificial Sequence
  LRRK2 RNA guide
ugggaagauacuuggaauagu

SEQ ID NO: 101578 - RNA, 21 nt, Artificial Sequence
  LRRK2 RNA guide
ugggaauaaccaagaacucuc

SEQ ID NO: 101579 - RNA, 21 nt, Artificial Sequence
  LRRK2 RNA guide
ugggaauauuguuaaaucauu

SEQ ID NO: 101580 - RNA, 21 nt, Artificial Sequence
  LRRK2 RNA guide
uggggcucuucaucccguuua

SEQ ID NO: 101581 - RNA, 21 nt, Artificial Sequence
  LRRK2 RNA guide
uggguucgguuuuagucucgu

SEQ ID NO: 101582 - RNA, 21 nt, Artificial Sequence
  LRRK2 RNA guide
ugguagaaggaggauaaaaau

SEQ ID NO: 101583 - RNA, 21 nt, Artificial Sequence
  LRRK2 RNA guide
uggugguagaaggaggauaaa

SEQ ID NO: 101584 - RNA, 21 nt, Artificial Sequence
  LRRK2 RNA guide
ugguuauucccaaaauuuggc

SEQ ID NO: 101585 - RNA, 21 nt, Artificial Sequence
  LRRK2 RNA guide
uguaaacgggaugaagagccc

SEQ ID NO: 101586 - RNA, 21 nt, Artificial Sequence
  LRRK2 RNA guide
uguauugggaagauacuugga

SEQ ID NO: 101587 - RNA, 21 nt, Artificial Sequence
  LRRK2 RNA guide
ugucacuagcaaacucuugua

SEQ ID NO: 101588 - RNA, 21 nt, Artificial Sequence
  LRRK2 RNA guide
uguccuagaugagaagauuau

SEQ ID NO: 101589 - RNA, 21 nt, Artificial Sequence
  LRRK2 RNA guide
uguguucccugagugucuuua

SEQ ID NO: 101590 - RNA, 21 nt, Artificial Sequence
  LRRK2 RNA guide
uguuaaaucauuacgcaaugu

SEQ ID NO: 101591 - RNA, 21 nt, Artificial Sequence
  LRRK2 RNA guide
uguuaauauagccgagaguuc

SEQ ID NO: 101592 - RNA, 21 nt, Artificial Sequence
  LRRK2 RNA guide
uguucccugagugucuuuaag

SEQ ID NO: 101593 - RNA, 21 nt, Artificial Sequence
  LRRK2 RNA guide
uguuuagacuugacuauucca

SEQ ID NO: 101594 - RNA, 21 nt, Artificial Sequence
  LRRK2 RNA guide
uguuuggaaggagacguuuua

SEQ ID NO: 101595 - RNA, 21 nt, Artificial Sequence
  LRRK2 RNA guide
uguuuucacuucaacucauuc

SEQ ID NO: 101596 - RNA, 21 nt, Artificial Sequence
  LRRK2 RNA guide
uuaaaaagugcugaacucuac

SEQ ID NO: 101597 - RNA, 21 nt, Artificial Sequence
  LRRK2 RNA guide
uuaaaaucacagucagagguu

SEQ ID NO: 101598 - RNA, 21 nt, Artificial Sequence
  LRRK2 RNA guide
uuaaagacacucagggaacac

SEQ ID NO: 101599 - RNA, 21 nt, Artificial Sequence
  LRRK2 RNA guide
uuaaaucauuacgcaauguaa

SEQ ID NO: 101600 - RNA, 21 nt, Artificial Sequence
  LRRK2 RNA guide
uuaacauugccaguaaaacgu

SEQ ID NO: 101601 - RNA, 21 nt, Artificial Sequence
  LRRK2 RNA guide
uuaauauagccgagaguucuu

SEQ ID NO: 101602 - RNA, 21 nt, Artificial Sequence
  LRRK2 RNA guide
uuacgcaauguaaacgggaug

SEQ ID NO: 101603 - RNA, 21 nt, Artificial Sequence
  LRRK2 RNA guide
uuacuggcaauguuaauauag

SEQ ID NO: 101604 - RNA, 21 nt, Artificial Sequence
  LRRK2 RNA guide
uuacuucuuaaagacacucag

SEQ ID NO: 101605 - RNA, 21 nt, Artificial Sequence
  LRRK2 RNA guide
uuagacuugacuauuccaagu

SEQ ID NO: 101606 - RNA, 21 nt, Artificial Sequence
  LRRK2 RNA guide
uuagucucguuauuggcaaga

SEQ ID NO: 101607 - RNA, 21 nt, Artificial Sequence
  LRRK2 RNA guide
uuaguguuuagacuugacuau

SEQ ID NO: 101608 - RNA, 21 nt, Artificial Sequence
  LRRK2 RNA guide
uuauaaaaccaacaguaugga

SEQ ID NO: 101609 - RNA, 21 nt, Artificial Sequence
  LRRK2 RNA guide
uuauccuccuucuaccaccau

SEQ ID NO: 101610 - RNA, 21 nt, Artificial Sequence
  LRRK2 RNA guide
uuaugaauaguuuggaaaagg

SEQ ID NO: 101611 - RNA, 21 nt, Artificial Sequence
  LRRK2 RNA guide
uuauucccaaaauuuggcuug

SEQ ID NO: 101612 - RNA, 21 nt, Artificial Sequence
  LRRK2 RNA guide
uuauuccccuuuuccaaacua

SEQ ID NO: 101613 - RNA, 21 nt, Artificial Sequence
  LRRK2 RNA guide
uuauuggcaagaugaauucau

SEQ ID NO: 101614 - RNA, 21 nt, Artificial Sequence
  LRRK2 RNA guide
uucaaagauuucuagccuuua

SEQ ID NO: 101615 - RNA, 21 nt, Artificial Sequence
  LRRK2 RNA guide
uucaacucauucucccuucug

SEQ ID NO: 101616 - RNA, 21 nt, Artificial Sequence
  LRRK2 RNA guide
uucacuucaacucauucuccc

SEQ ID NO: 101617 - RNA, 21 nt, Artificial Sequence
  LRRK2 RNA guide
uucauaaucuucucaucuagg

SEQ ID NO: 101618 - RNA, 21 nt, Artificial Sequence
  LRRK2 RNA guide
uucaucccguuuacauugcgu

SEQ ID NO: 101619 - RNA, 21 nt, Artificial Sequence
  LRRK2 RNA guide
uucaucuugccaauaacgaga

SEQ ID NO: 101620 - RNA, 21 nt, Artificial Sequence
  LRRK2 RNA guide
uuccaaacagaagggagaaug

SEQ ID NO: 101621 - RNA, 21 nt, Artificial Sequence
  LRRK2 RNA guide
uuccaaguaucuucccaauac

SEQ ID NO: 101622 - RNA, 21 nt, Artificial Sequence
  LRRK2 RNA guide
uucccaaaauuuggcuugagg

SEQ ID NO: 101623 - RNA, 21 nt, Artificial Sequence
  LRRK2 RNA guide
uucccaauacagagcaugucc

SEQ ID NO: 101624 - RNA, 21 nt, Artificial Sequence
  LRRK2 RNA guide
uucccaucuuaaaaucacagu

SEQ ID NO: 101625 - RNA, 21 nt, Artificial Sequence
  LRRK2 RNA guide
uuccccuuuuccaaacuauuc

SEQ ID NO: 101626 - RNA, 21 nt, Artificial Sequence
  LRRK2 RNA guide
uucccugagugucuuuaagaa

SEQ ID NO: 101627 - RNA, 21 nt, Artificial Sequence
  LRRK2 RNA guide
uuccucaagccaaauuuuggg

SEQ ID NO: 101628 - RNA, 21 nt, Artificial Sequence
  LRRK2 RNA guide
uucgguuuuagucucguuauu

SEQ ID NO: 101629 - RNA, 21 nt, Artificial Sequence
  LRRK2 RNA guide
uucuaccaccauccauacugu

SEQ ID NO: 101630 - RNA, 21 nt, Artificial Sequence
  LRRK2 RNA guide
uucuagccuuuaguuguagua

SEQ ID NO: 101631 - RNA, 21 nt, Artificial Sequence
  LRRK2 RNA guide
uucucaucuaggacaugcucu

SEQ ID NO: 101632 - RNA, 21 nt, Artificial Sequence
  LRRK2 RNA guide
uucucccuucuguuuggaagg

SEQ ID NO: 101633 - RNA, 21 nt, Artificial Sequence
  LRRK2 RNA guide
uucuguuuggaaggagacguu

SEQ ID NO: 101634 - RNA, 21 nt, Artificial Sequence
  LRRK2 RNA guide
uucuuaaagacacucagggaa

SEQ ID NO: 101635 - RNA, 21 nt, Artificial Sequence
  LRRK2 RNA guide
uucuugguuauucccaaaauu

SEQ ID NO: 101636 - RNA, 21 nt, Artificial Sequence
  LRRK2 RNA guide
uugacuauuccaaguaucuuc

SEQ ID NO: 101637 - RNA, 21 nt, Artificial Sequence
  LRRK2 RNA guide
uugaggaaccucugacuguga

SEQ ID NO: 101638 - RNA, 21 nt, Artificial Sequence
  LRRK2 RNA guide
uugccaauaacgagacuaaaa

SEQ ID NO: 101639 - RNA, 21 nt, Artificial Sequence
  LRRK2 RNA guide
uugccaguaaaacgucuccuu

SEQ ID NO: 101640 - RNA, 21 nt, Artificial Sequence
  LRRK2 RNA guide
uugcguaaugauuuaacaaua

SEQ ID NO: 101641 - RNA, 21 nt, Artificial Sequence
  LRRK2 RNA guide
uugcuagugacaaaguugcau

SEQ ID NO: 101642 - RNA, 21 nt, Artificial Sequence
  LRRK2 RNA guide
uuggaaaaggggaauaauuaa

SEQ ID NO: 101643 - RNA, 21 nt, Artificial Sequence
  LRRK2 RNA guide
uuggaaggagacguuuuacug

SEQ ID NO: 101644 - RNA, 21 nt, Artificial Sequence
  LRRK2 RNA guide
uuggaauagucaagucuaaac

SEQ ID NO: 101645 - RNA, 21 nt, Artificial Sequence
  LRRK2 RNA guide
uuggcaagaugaauucauuag

SEQ ID NO: 101646 - RNA, 21 nt, Artificial Sequence
  LRRK2 RNA guide
uuggcuugaggaaccucugac

SEQ ID NO: 101647 - RNA, 21 nt, Artificial Sequence
  LRRK2 RNA guide
uugggaagauacuuggaauag

SEQ ID NO: 101648 - RNA, 21 nt, Artificial Sequence
  LRRK2 RNA guide
uugggaauaaccaagaacucu

SEQ ID NO: 101649 - RNA, 21 nt, Artificial Sequence
  LRRK2 RNA guide
uugguuauucccaaaauuugg

SEQ ID NO: 101650 - RNA, 21 nt, Artificial Sequence
  LRRK2 RNA guide
uugucacuagcaaacucuugu

SEQ ID NO: 101651 - RNA, 21 nt, Artificial Sequence
  LRRK2 RNA guide
uuguuuucacuucaacucauu

SEQ ID NO: 101652 - RNA, 21 nt, Artificial Sequence
  LRRK2 RNA guide
uuuaaaaagugcugaacucua

SEQ ID NO: 101653 - RNA, 21 nt, Artificial Sequence
  LRRK2 RNA guide
uuuacuggcaauguuaauaua

SEQ ID NO: 101654 - RNA, 21 nt, Artificial Sequence
  LRRK2 RNA guide
uuuagacuugacuauuccaag

SEQ ID NO: 101655 - RNA, 21 nt, Artificial Sequence
  LRRK2 RNA guide
uuuagucucguuauuggcaag

SEQ ID NO: 101656 - RNA, 21 nt, Artificial Sequence
  LRRK2 RNA guide
uuuauaaaaccaacaguaugg

SEQ ID NO: 101657 - RNA, 21 nt, Artificial Sequence
  LRRK2 RNA guide
uuuauccuccuucuaccacca

SEQ ID NO: 101658 - RNA, 21 nt, Artificial Sequence
  LRRK2 RNA guide
uuucacuucaacucauucucc

SEQ ID NO: 101659 - RNA, 21 nt, Artificial Sequence
  LRRK2 RNA guide
uuucuagccuuuaguuguagu

SEQ ID NO: 101660 - RNA, 21 nt, Artificial Sequence
  LRRK2 RNA guide
uuugcuagugacaaaguugca

SEQ ID NO: 101661 - RNA, 21 nt, Artificial Sequence
  LRRK2 RNA guide
uuuggaaggagacguuuuacu

SEQ ID NO: 101662 - RNA, 21 nt, Artificial Sequence
  LRRK2 RNA guide
uuuggcuugaggaaccucuga

SEQ ID NO: 101663 - RNA, 21 nt, Artificial Sequence
  LRRK2 RNA guide
uuugggaauaaccaagaacuc

SEQ ID NO: 101664 - RNA, 21 nt, Artificial Sequence
  LRRK2 RNA guide
uuugucacuagcaaacucuug

SEQ ID NO: 101665 - RNA, 21 nt, Artificial Sequence
  LRRK2 RNA guide
uuuuaaaaagugcugaacucu

SEQ ID NO: 101666 - RNA, 21 nt, Artificial Sequence
  LRRK2 RNA guide
uuuuacuggcaauguuaauau

SEQ ID NO: 101667 - RNA, 21 nt, Artificial Sequence
  LRRK2 RNA guide
uuuuagucucguuauuggcaa

SEQ ID NO: 101668 - RNA, 21 nt, Artificial Sequence
  LRRK2 RNA guide
uuuuauccuccuucuaccacc

SEQ ID NO: 101669 - RNA, 21 nt, Artificial Sequence
  LRRK2 RNA guide
uuuucacuucaacucauucuc

SEQ ID NO: 101670 - RNA, 21 nt, Artificial Sequence
  LRRK2 RNA guide
uuuugggaauaaccaagaacu

SEQ ID NO: 101671 - RNA, 21 nt, Artificial Sequence
  LRRK2 RNA guide
uuuuuauccuccuucuaccac

SEQ ID NO: 101672 - RNA, 22 nt, Artificial Sequence
  LRRK2 RNA guide
aaaaagugcugaacucuacaag

SEQ ID NO: 101673 - RNA, 22 nt, Artificial Sequence
  LRRK2 RNA guide
aaaaauggguucgguuuuaguc

SEQ ID NO: 101674 - RNA, 22 nt, Artificial Sequence
  LRRK2 RNA guide
aaaaccaacaguauggauggug

SEQ ID NO: 101675 - RNA, 22 nt, Artificial Sequence
  LRRK2 RNA guide
aaaaccgaacccauuuuuaucc

SEQ ID NO: 101676 - RNA, 22 nt, Artificial Sequence
  LRRK2 RNA guide
aaaacgucuccuuccaaacaga

SEQ ID NO: 101677 - RNA, 22 nt, Artificial Sequence
  LRRK2 RNA guide
aaaagugcugaacucuacaaga

SEQ ID NO: 101678 - RNA, 22 nt, Artificial Sequence
  LRRK2 RNA guide
aaaaucacagucagagguuccu

SEQ ID NO: 101679 - RNA, 22 nt, Artificial Sequence
  LRRK2 RNA guide
aaaaugcaacuuugucacuagc

SEQ ID NO: 101680 - RNA, 22 nt, Artificial Sequence
  LRRK2 RNA guide
aaaauggguucgguuuuagucu

SEQ ID NO: 101681 - RNA, 22 nt, Artificial Sequence
  LRRK2 RNA guide
aaaauuuggcuugaggaaccuc

SEQ ID NO: 101682 - RNA, 22 nt, Artificial Sequence
  LRRK2 RNA guide
aaacagaagggagaaugaguug

SEQ ID NO: 101683 - RNA, 22 nt, Artificial Sequence
  LRRK2 RNA guide
aaaccaacaguauggauggugg

SEQ ID NO: 101684 - RNA, 22 nt, Artificial Sequence
  LRRK2 RNA guide
aaaccgaacccauuuuuauccu

SEQ ID NO: 101685 - RNA, 22 nt, Artificial Sequence
  LRRK2 RNA guide
aaacgggaugaagagccccagu

SEQ ID NO: 101686 - RNA, 22 nt, Artificial Sequence
  LRRK2 RNA guide
aaacgucuccuuccaaacagaa

SEQ ID NO: 101687 - RNA, 22 nt, Artificial Sequence
  LRRK2 RNA guide
aaacucuuguagaguucagcac

SEQ ID NO: 101688 - RNA, 22 nt, Artificial Sequence
  LRRK2 RNA guide
aaagacacucagggaacacaua

SEQ ID NO: 101689 - RNA, 22 nt, Artificial Sequence
  LRRK2 RNA guide
aaaggcauuguuuucacuucaa

SEQ ID NO: 101690 - RNA, 22 nt, Artificial Sequence
  LRRK2 RNA guide
aaagugcugaacucuacaagag

SEQ ID NO: 101691 - RNA, 22 nt, Artificial Sequence
  LRRK2 RNA guide
aaaguuacuucuuaaagacacu

SEQ ID NO: 101692 - RNA, 22 nt, Artificial Sequence
  LRRK2 RNA guide
aaaucacagucagagguuccuc

SEQ ID NO: 101693 - RNA, 22 nt, Artificial Sequence
  LRRK2 RNA guide
aaaucauuacgcaauguaaacg

SEQ ID NO: 101694 - RNA, 22 nt, Artificial Sequence
  LRRK2 RNA guide
aaaugcaacuuugucacuagca

SEQ ID NO: 101695 - RNA, 22 nt, Artificial Sequence
  LRRK2 RNA guide
aaauggguucgguuuuagucuc

SEQ ID NO: 101696 - RNA, 22 nt, Artificial Sequence
  LRRK2 RNA guide
aaauuuggcuugaggaaccucu

SEQ ID NO: 101697 - RNA, 22 nt, Artificial Sequence
  LRRK2 RNA guide
aaauuuugggaauaaccaagaa

SEQ ID NO: 101698 - RNA, 22 nt, Artificial Sequence
  LRRK2 RNA guide
aacacauacuggggcucuucau

SEQ ID NO: 101699 - RNA, 22 nt, Artificial Sequence
  LRRK2 RNA guide
aacagaagggagaaugaguuga

SEQ ID NO: 101700 - RNA, 22 nt, Artificial Sequence
  LRRK2 RNA guide
aacaguauggauggugguagaa

SEQ ID NO: 101701 - RNA, 22 nt, Artificial Sequence
  LRRK2 RNA guide
aacauugccaguaaaacgucuc

SEQ ID NO: 101702 - RNA, 22 nt, Artificial Sequence
  LRRK2 RNA guide
aaccaacaguauggaugguggu

SEQ ID NO: 101703 - RNA, 22 nt, Artificial Sequence
  LRRK2 RNA guide
aaccaagaacucucggcuauau

SEQ ID NO: 101704 - RNA, 22 nt, Artificial Sequence
  LRRK2 RNA guide
aacccauuuuuauccuccuucu

SEQ ID NO: 101705 - RNA, 22 nt, Artificial Sequence
  LRRK2 RNA guide
aaccgaacccauuuuuauccuc

SEQ ID NO: 101706 - RNA, 22 nt, Artificial Sequence
  LRRK2 RNA guide
aaccucugacugugauuuuaag

SEQ ID NO: 101707 - RNA, 22 nt, Artificial Sequence
  LRRK2 RNA guide
aacgagacuaaaaccgaaccca

SEQ ID NO: 101708 - RNA, 22 nt, Artificial Sequence
  LRRK2 RNA guide
aacgggaugaagagccccagua

SEQ ID NO: 101709 - RNA, 22 nt, Artificial Sequence
  LRRK2 RNA guide
aacgucuccuuccaaacagaag

SEQ ID NO: 101710 - RNA, 22 nt, Artificial Sequence
  LRRK2 RNA guide
aacucauucucccuucuguuug

SEQ ID NO: 101711 - RNA, 22 nt, Artificial Sequence
  LRRK2 RNA guide
aacucuacaagaguuugcuagu

SEQ ID NO: 101712 - RNA, 22 nt, Artificial Sequence
  LRRK2 RNA guide
aacucucggcuauauuaacauu

SEQ ID NO: 101713 - RNA, 22 nt, Artificial Sequence
  LRRK2 RNA guide
aacucuuguagaguucagcacu

SEQ ID NO: 101714 - RNA, 22 nt, Artificial Sequence
  LRRK2 RNA guide
aacuuugucacuagcaaacucu

SEQ ID NO: 101715 - RNA, 22 nt, Artificial Sequence
  LRRK2 RNA guide
aagaacucucggcuauauuaac

SEQ ID NO: 101716 - RNA, 22 nt, Artificial Sequence
  LRRK2 RNA guide
aagacacucagggaacacauac

SEQ ID NO: 101717 - RNA, 22 nt, Artificial Sequence
  LRRK2 RNA guide
aagagccccaguauguguuccc

SEQ ID NO: 101718 - RNA, 22 nt, Artificial Sequence
  LRRK2 RNA guide
aagaguuugcuagugacaaagu

SEQ ID NO: 101719 - RNA, 22 nt, Artificial Sequence
  LRRK2 RNA guide
aagauuaugaauaguuuggaaa

SEQ ID NO: 101720 - RNA, 22 nt, Artificial Sequence
  LRRK2 RNA guide
aagccaaauuuugggaauaacc

SEQ ID NO: 101721 - RNA, 22 nt, Artificial Sequence
  LRRK2 RNA guide
aaggagacguuuuacuggcaau

SEQ ID NO: 101722 - RNA, 22 nt, Artificial Sequence
  LRRK2 RNA guide
aaggaggauaaaaauggguucg

SEQ ID NO: 101723 - RNA, 22 nt, Artificial Sequence
  LRRK2 RNA guide
aaggcauuguuuucacuucaac

SEQ ID NO: 101724 - RNA, 22 nt, Artificial Sequence
  LRRK2 RNA guide
aagggagaaugaguugaaguga

SEQ ID NO: 101725 - RNA, 22 nt, Artificial Sequence
  LRRK2 RNA guide
aagguauacuacaacuaaaggc

SEQ ID NO: 101726 - RNA, 22 nt, Artificial Sequence
  LRRK2 RNA guide
aaguaucuucccaauacagagc

SEQ ID NO: 101727 - RNA, 22 nt, Artificial Sequence
  LRRK2 RNA guide
aagugcugaacucuacaagagu

SEQ ID NO: 101728 - RNA, 22 nt, Artificial Sequence
  LRRK2 RNA guide
aaguuacuucuuaaagacacuc

SEQ ID NO: 101729 - RNA, 22 nt, Artificial Sequence
  LRRK2 RNA guide
aauaaccaagaacucucggcua

SEQ ID NO: 101730 - RNA, 22 nt, Artificial Sequence
  LRRK2 RNA guide
aauaacgagacuaaaaccgaac

SEQ ID NO: 101731 - RNA, 22 nt, Artificial Sequence
  LRRK2 RNA guide
aauacagagcauguccuagaug

SEQ ID NO: 101732 - RNA, 22 nt, Artificial Sequence
  LRRK2 RNA guide
aauauagccgagaguucuuggu

SEQ ID NO: 101733 - RNA, 22 nt, Artificial Sequence
  LRRK2 RNA guide
aaucacagucagagguuccuca

SEQ ID NO: 101734 - RNA, 22 nt, Artificial Sequence
  LRRK2 RNA guide
aaucauuacgcaauguaaacgg

SEQ ID NO: 101735 - RNA, 22 nt, Artificial Sequence
  LRRK2 RNA guide
aaucuucucaucuaggacaugc

SEQ ID NO: 101736 - RNA, 22 nt, Artificial Sequence
  LRRK2 RNA guide
aaugaauucaucuugccaauaa

SEQ ID NO: 101737 - RNA, 22 nt, Artificial Sequence
  LRRK2 RNA guide
aaugaguugaagugaaaacaau

SEQ ID NO: 101738 - RNA, 22 nt, Artificial Sequence
  LRRK2 RNA guide
aaugcaacuuugucacuagcaa

SEQ ID NO: 101739 - RNA, 22 nt, Artificial Sequence
  LRRK2 RNA guide
aauggguucgguuuuagucucg

SEQ ID NO: 101740 - RNA, 22 nt, Artificial Sequence
  LRRK2 RNA guide
aauguaaacgggaugaagagcc

SEQ ID NO: 101741 - RNA, 22 nt, Artificial Sequence
  LRRK2 RNA guide
aauguuaauauagccgagaguu

SEQ ID NO: 101742 - RNA, 22 nt, Artificial Sequence
  LRRK2 RNA guide
aauucaucuugccaauaacgag

SEQ ID NO: 101743 - RNA, 22 nt, Artificial Sequence
  LRRK2 RNA guide
aauuuggcuugaggaaccucug

SEQ ID NO: 101744 - RNA, 22 nt, Artificial Sequence
  LRRK2 RNA guide
aauuuugggaauaaccaagaac

SEQ ID NO: 101745 - RNA, 22 nt, Artificial Sequence
  LRRK2 RNA guide
acaagaguuugcuagugacaaa

SEQ ID NO: 101746 - RNA, 22 nt, Artificial Sequence
  LRRK2 RNA guide
acaagguauacuacaacuaaag

SEQ ID NO: 101747 - RNA, 22 nt, Artificial Sequence
  LRRK2 RNA guide
acacauacuggggcucuucauc

SEQ ID NO: 101748 - RNA, 22 nt, Artificial Sequence
  LRRK2 RNA guide
acacucagggaacacauacugg

SEQ ID NO: 101749 - RNA, 22 nt, Artificial Sequence
  LRRK2 RNA guide
acagaagggagaaugaguugaa

SEQ ID NO: 101750 - RNA, 22 nt, Artificial Sequence
  LRRK2 RNA guide
acagagcauguccuagaugaga

SEQ ID NO: 101751 - RNA, 22 nt, Artificial Sequence
  LRRK2 RNA guide
acaguauggauggugguagaag

SEQ ID NO: 101752 - RNA, 22 nt, Artificial Sequence
  LRRK2 RNA guide
acagucagagguuccucaagcc

SEQ ID NO: 101753 - RNA, 22 nt, Artificial Sequence
  LRRK2 RNA guide
acauacuggggcucuucauccc

SEQ ID NO: 101754 - RNA, 22 nt, Artificial Sequence
  LRRK2 RNA guide
acaugcucuguauugggaagau

SEQ ID NO: 101755 - RNA, 22 nt, Artificial Sequence
  LRRK2 RNA guide
acauugccaguaaaacgucucc

SEQ ID NO: 101756 - RNA, 22 nt, Artificial Sequence
  LRRK2 RNA guide
accaacaguauggaugguggua

SEQ ID NO: 101757 - RNA, 22 nt, Artificial Sequence
  LRRK2 RNA guide
accaagaacucucggcuauauu

SEQ ID NO: 101758 - RNA, 22 nt, Artificial Sequence
  LRRK2 RNA guide
accaccauccauacuguugguu

SEQ ID NO: 101759 - RNA, 22 nt, Artificial Sequence
  LRRK2 RNA guide
accauccauacuguugguuuua

SEQ ID NO: 101760 - RNA, 22 nt, Artificial Sequence
  LRRK2 RNA guide
acccauuuuuauccuccuucua

SEQ ID NO: 101761 - RNA, 22 nt, Artificial Sequence
  LRRK2 RNA guide
accgaacccauuuuuauccucc

SEQ ID NO: 101762 - RNA, 22 nt, Artificial Sequence
  LRRK2 RNA guide
accucugacugugauuuuaaga

SEQ ID NO: 101763 - RNA, 22 nt, Artificial Sequence
  LRRK2 RNA guide
acgagacuaaaaccgaacccau

SEQ ID NO: 101764 - RNA, 22 nt, Artificial Sequence
  LRRK2 RNA guide
acgcaauguaaacgggaugaag

SEQ ID NO: 101765 - RNA, 22 nt, Artificial Sequence
  LRRK2 RNA guide
acgggaugaagagccccaguau

SEQ ID NO: 101766 - RNA, 22 nt, Artificial Sequence
  LRRK2 RNA guide
acgucuccuuccaaacagaagg

SEQ ID NO: 101767 - RNA, 22 nt, Artificial Sequence
  LRRK2 RNA guide
acguuuuacuggcaauguuaau

SEQ ID NO: 101768 - RNA, 22 nt, Artificial Sequence
  LRRK2 RNA guide
acuaaaaccgaacccauuuuua

SEQ ID NO: 101769 - RNA, 22 nt, Artificial Sequence
  LRRK2 RNA guide
acuaaugaauucaucuugccaa

SEQ ID NO: 101770 - RNA, 22 nt, Artificial Sequence
  LRRK2 RNA guide
acuacaacuaaaggcuagaaau

SEQ ID NO: 101771 - RNA, 22 nt, Artificial Sequence
  LRRK2 RNA guide
acuagcaaacucuuguagaguu

SEQ ID NO: 101772 - RNA, 22 nt, Artificial Sequence
  LRRK2 RNA guide
acuauucauaaucuucucaucu

SEQ ID NO: 101773 - RNA, 22 nt, Artificial Sequence
  LRRK2 RNA guide
acuauuccaaguaucuucccaa

SEQ ID NO: 101774 - RNA, 22 nt, Artificial Sequence
  LRRK2 RNA guide
acucagggaacacauacugggg

SEQ ID NO: 101775 - RNA, 22 nt, Artificial Sequence
  LRRK2 RNA guide
acucauucucccuucuguuugg

SEQ ID NO: 101776 - RNA, 22 nt, Artificial Sequence
  LRRK2 RNA guide
acucuacaagaguuugcuagug

SEQ ID NO: 101777 - RNA, 22 nt, Artificial Sequence
  LRRK2 RNA guide
acucucggcuauauuaacauug

SEQ ID NO: 101778 - RNA, 22 nt, Artificial Sequence
  LRRK2 RNA guide
acucuuguagaguucagcacuu

SEQ ID NO: 101779 - RNA, 22 nt, Artificial Sequence
  LRRK2 RNA guide
acuggcaauguuaauauagccg

SEQ ID NO: 101780 - RNA, 22 nt, Artificial Sequence
  LRRK2 RNA guide
acuggggcucuucaucccguuu

SEQ ID NO: 101781 - RNA, 22 nt, Artificial Sequence
  LRRK2 RNA guide
acuucaacucauucucccuucu

SEQ ID NO: 101782 - RNA, 22 nt, Artificial Sequence
  LRRK2 RNA guide
acuucuuaaagacacucaggga

SEQ ID NO: 101783 - RNA, 22 nt, Artificial Sequence
  LRRK2 RNA guide
acuugacuauuccaaguaucuu

SEQ ID NO: 101784 - RNA, 22 nt, Artificial Sequence
  LRRK2 RNA guide
acuuggaauagucaagucuaaa

SEQ ID NO: 101785 - RNA, 22 nt, Artificial Sequence
  LRRK2 RNA guide
acuuuauaaaaccaacaguaug

SEQ ID NO: 101786 - RNA, 22 nt, Artificial Sequence
  LRRK2 RNA guide
acuuugucacuagcaaacucuu

SEQ ID NO: 101787 - RNA, 22 nt, Artificial Sequence
  LRRK2 RNA guide
agaacucucggcuauauuaaca

SEQ ID NO: 101788 - RNA, 22 nt, Artificial Sequence
  LRRK2 RNA guide
agaaggaggauaaaaauggguu

SEQ ID NO: 101789 - RNA, 22 nt, Artificial Sequence
  LRRK2 RNA guide
agaagggagaaugaguugaagu

SEQ ID NO: 101790 - RNA, 22 nt, Artificial Sequence
  LRRK2 RNA guide
agaaugaguugaagugaaaaca

SEQ ID NO: 101791 - RNA, 22 nt, Artificial Sequence
  LRRK2 RNA guide
agacacucagggaacacauacu

SEQ ID NO: 101792 - RNA, 22 nt, Artificial Sequence
  LRRK2 RNA guide
agacuaaaaccgaacccauuuu

SEQ ID NO: 101793 - RNA, 22 nt, Artificial Sequence
  LRRK2 RNA guide
agacuugacuauuccaaguauc

SEQ ID NO: 101794 - RNA, 22 nt, Artificial Sequence
  LRRK2 RNA guide
agagcauguccuagaugagaag

SEQ ID NO: 101795 - RNA, 22 nt, Artificial Sequence
  LRRK2 RNA guide
agagccccaguauguguucccu

SEQ ID NO: 101796 - RNA, 22 nt, Artificial Sequence
  LRRK2 RNA guide
agagguuccucaagccaaauuu

SEQ ID NO: 101797 - RNA, 22 nt, Artificial Sequence
  LRRK2 RNA guide
agaguucuugguuauucccaaa

SEQ ID NO: 101798 - RNA, 22 nt, Artificial Sequence
  LRRK2 RNA guide
agaguuugcuagugacaaaguu

SEQ ID NO: 101799 - RNA, 22 nt, Artificial Sequence
  LRRK2 RNA guide
agauacuuggaauagucaaguc

SEQ ID NO: 101800 - RNA, 22 nt, Artificial Sequence
  LRRK2 RNA guide
agauuaugaauaguuuggaaaa

SEQ ID NO: 101801 - RNA, 22 nt, Artificial Sequence
  LRRK2 RNA guide
agcaaacucuuguagaguucag

SEQ ID NO: 101802 - RNA, 22 nt, Artificial Sequence
  LRRK2 RNA guide
agcauguccuagaugagaagau

SEQ ID NO: 101803 - RNA, 22 nt, Artificial Sequence
  LRRK2 RNA guide
agccaaauuuugggaauaacca

SEQ ID NO: 101804 - RNA, 22 nt, Artificial Sequence
  LRRK2 RNA guide
agccccaguauguguucccuga

SEQ ID NO: 101805 - RNA, 22 nt, Artificial Sequence
  LRRK2 RNA guide
agccgagaguucuugguuauuc

SEQ ID NO: 101806 - RNA, 22 nt, Artificial Sequence
  LRRK2 RNA guide
aggaaccucugacugugauuuu

SEQ ID NO: 101807 - RNA, 22 nt, Artificial Sequence
  LRRK2 RNA guide
aggacaugcucuguauugggaa

SEQ ID NO: 101808 - RNA, 22 nt, Artificial Sequence
  LRRK2 RNA guide
aggagacguuuuacuggcaaug

SEQ ID NO: 101809 - RNA, 22 nt, Artificial Sequence
  LRRK2 RNA guide
aggaggauaaaaauggguucgg

SEQ ID NO: 101810 - RNA, 22 nt, Artificial Sequence
  LRRK2 RNA guide
aggauaaaaauggguucgguuu

SEQ ID NO: 101811 - RNA, 22 nt, Artificial Sequence
  LRRK2 RNA guide
aggcauuguuuucacuucaacu

SEQ ID NO: 101812 - RNA, 22 nt, Artificial Sequence
  LRRK2 RNA guide
agggaacacauacuggggcucu

SEQ ID NO: 101813 - RNA, 22 nt, Artificial Sequence
  LRRK2 RNA guide
agggagaaugaguugaagugaa

SEQ ID NO: 101814 - RNA, 22 nt, Artificial Sequence
  LRRK2 RNA guide
agguauacuacaacuaaaggcu

SEQ ID NO: 101815 - RNA, 22 nt, Artificial Sequence
  LRRK2 RNA guide
agguuccucaagccaaauuuug

SEQ ID NO: 101816 - RNA, 22 nt, Artificial Sequence
  LRRK2 RNA guide
aguaaaacgucuccuuccaaac

SEQ ID NO: 101817 - RNA, 22 nt, Artificial Sequence
  LRRK2 RNA guide
aguaucuucccaauacagagca

SEQ ID NO: 101818 - RNA, 22 nt, Artificial Sequence
  LRRK2 RNA guide
aguauggauggugguagaagga

SEQ ID NO: 101819 - RNA, 22 nt, Artificial Sequence
  LRRK2 RNA guide
aguauguguucccugagugucu

SEQ ID NO: 101820 - RNA, 22 nt, Artificial Sequence
  LRRK2 RNA guide
agucagagguuccucaagccaa

SEQ ID NO: 101821 - RNA, 22 nt, Artificial Sequence
  LRRK2 RNA guide
agucucguuauuggcaagauga

SEQ ID NO: 101822 - RNA, 22 nt, Artificial Sequence
  LRRK2 RNA guide
agugauaaaaugcaacuuuguc

SEQ ID NO: 101823 - RNA, 22 nt, Artificial Sequence
  LRRK2 RNA guide
agugcugaacucuacaagaguu

SEQ ID NO: 101824 - RNA, 22 nt, Artificial Sequence
  LRRK2 RNA guide
aguguuuagacuugacuauucc

SEQ ID NO: 101825 - RNA, 22 nt, Artificial Sequence
  LRRK2 RNA guide
aguuacuucuuaaagacacuca

SEQ ID NO: 101826 - RNA, 22 nt, Artificial Sequence
  LRRK2 RNA guide
aguucuugguuauucccaaaau

SEQ ID NO: 101827 - RNA, 22 nt, Artificial Sequence
  LRRK2 RNA guide
aguuugcuagugacaaaguugc

SEQ ID NO: 101828 - RNA, 22 nt, Artificial Sequence
  LRRK2 RNA guide
auaaaaauggguucgguuuuag

SEQ ID NO: 101829 - RNA, 22 nt, Artificial Sequence
  LRRK2 RNA guide
auaaaaccaacaguauggaugg

SEQ ID NO: 101830 - RNA, 22 nt, Artificial Sequence
  LRRK2 RNA guide
auaaccaagaacucucggcuau

SEQ ID NO: 101831 - RNA, 22 nt, Artificial Sequence
  LRRK2 RNA guide
auaacgagacuaaaaccgaacc

SEQ ID NO: 101832 - RNA, 22 nt, Artificial Sequence
  LRRK2 RNA guide
auaaucuucucaucuaggacau

SEQ ID NO: 101833 - RNA, 22 nt, Artificial Sequence
  LRRK2 RNA guide
auacagagcauguccuagauga

SEQ ID NO: 101834 - RNA, 22 nt, Artificial Sequence
  LRRK2 RNA guide
auacuggggcucuucaucccgu

SEQ ID NO: 101835 - RNA, 22 nt, Artificial Sequence
  LRRK2 RNA guide
auacuuggaauagucaagucua

SEQ ID NO: 101836 - RNA, 22 nt, Artificial Sequence
  LRRK2 RNA guide
auagccgagaguucuugguuau

SEQ ID NO: 101837 - RNA, 22 nt, Artificial Sequence
  LRRK2 RNA guide
auauagccgagaguucuugguu

SEQ ID NO: 101838 - RNA, 22 nt, Artificial Sequence
  LRRK2 RNA guide
auauuaacauugccaguaaaac

SEQ ID NO: 101839 - RNA, 22 nt, Artificial Sequence
  LRRK2 RNA guide
auauucccaucuuaaaaucaca

SEQ ID NO: 101840 - RNA, 22 nt, Artificial Sequence
  LRRK2 RNA guide
aucacagucagagguuccucaa

SEQ ID NO: 101841 - RNA, 22 nt, Artificial Sequence
  LRRK2 RNA guide
aucauuacgcaauguaaacggg

SEQ ID NO: 101842 - RNA, 22 nt, Artificial Sequence
  LRRK2 RNA guide
aucccguuuacauugcguaaug

SEQ ID NO: 101843 - RNA, 22 nt, Artificial Sequence
  LRRK2 RNA guide
auccuccuucuaccaccaucca

SEQ ID NO: 101844 - RNA, 22 nt, Artificial Sequence
  LRRK2 RNA guide
aucuaggacaugcucuguauug

SEQ ID NO: 101845 - RNA, 22 nt, Artificial Sequence
  LRRK2 RNA guide
aucuuaaaaucacagucagagg

SEQ ID NO: 101846 - RNA, 22 nt, Artificial Sequence
  LRRK2 RNA guide
aucuucccaauacagagcaugu

SEQ ID NO: 101847 - RNA, 22 nt, Artificial Sequence
  LRRK2 RNA guide
aucuucucaucuaggacaugcu

SEQ ID NO: 101848 - RNA, 22 nt, Artificial Sequence
  LRRK2 RNA guide
aucuugccaauaacgagacuaa

SEQ ID NO: 101849 - RNA, 22 nt, Artificial Sequence
  LRRK2 RNA guide
augaagagccccaguauguguu

SEQ ID NO: 101850 - RNA, 22 nt, Artificial Sequence
  LRRK2 RNA guide
augaauucaucuugccaauaac

SEQ ID NO: 101851 - RNA, 22 nt, Artificial Sequence
  LRRK2 RNA guide
augaguugaagugaaaacaaug

SEQ ID NO: 101852 - RNA, 22 nt, Artificial Sequence
  LRRK2 RNA guide
augcaacuuugucacuagcaaa

SEQ ID NO: 101853 - RNA, 22 nt, Artificial Sequence
  LRRK2 RNA guide
augcucuguauugggaagauac

SEQ ID NO: 101854 - RNA, 22 nt, Artificial Sequence
  LRRK2 RNA guide
auggauggugguagaaggagga

SEQ ID NO: 101855 - RNA, 22 nt, Artificial Sequence
  LRRK2 RNA guide
auggguucgguuuuagucucgu

SEQ ID NO: 101856 - RNA, 22 nt, Artificial Sequence
  LRRK2 RNA guide
auggugguagaaggaggauaaa

SEQ ID NO: 101857 - RNA, 22 nt, Artificial Sequence
  LRRK2 RNA guide
auguaaacgggaugaagagccc

SEQ ID NO: 101858 - RNA, 22 nt, Artificial Sequence
  LRRK2 RNA guide
auguguucccugagugucuuua

SEQ ID NO: 101859 - RNA, 22 nt, Artificial Sequence
  LRRK2 RNA guide
auguuaauauagccgagaguuc

SEQ ID NO: 101860 - RNA, 22 nt, Artificial Sequence
  LRRK2 RNA guide
auuaacauugccaguaaaacgu

SEQ ID NO: 101861 - RNA, 22 nt, Artificial Sequence
  LRRK2 RNA guide
auuacgcaauguaaacgggaug

SEQ ID NO: 101862 - RNA, 22 nt, Artificial Sequence
  LRRK2 RNA guide
auucauaaucuucucaucuagg

SEQ ID NO: 101863 - RNA, 22 nt, Artificial Sequence
  LRRK2 RNA guide
auucaucuugccaauaacgaga

SEQ ID NO: 101864 - RNA, 22 nt, Artificial Sequence
  LRRK2 RNA guide
auuccaaguaucuucccaauac

SEQ ID NO: 101865 - RNA, 22 nt, Artificial Sequence
  LRRK2 RNA guide
auucccaaaauuuggcuugagg

SEQ ID NO: 101866 - RNA, 22 nt, Artificial Sequence
  LRRK2 RNA guide
auucccaucuuaaaaucacagu

SEQ ID NO: 101867 - RNA, 22 nt, Artificial Sequence
  LRRK2 RNA guide
auucucccuucuguuuggaagg

SEQ ID NO: 101868 - RNA, 22 nt, Artificial Sequence
  LRRK2 RNA guide
auugccaguaaaacgucuccuu

SEQ ID NO: 101869 - RNA, 22 nt, Artificial Sequence
  LRRK2 RNA guide
auugggaagauacuuggaauag

SEQ ID NO: 101870 - RNA, 22 nt, Artificial Sequence
  LRRK2 RNA guide
auuguuuucacuucaacucauu

SEQ ID NO: 101871 - RNA, 22 nt, Artificial Sequence
  LRRK2 RNA guide
auuucuagccuuuaguuguagu

SEQ ID NO: 101872 - RNA, 22 nt, Artificial Sequence
  LRRK2 RNA guide
auuuggcuugaggaaccucuga

SEQ ID NO: 101873 - RNA, 22 nt, Artificial Sequence
  LRRK2 RNA guide
auuuugggaauaaccaagaacu

SEQ ID NO: 101874 - RNA, 22 nt, Artificial Sequence
  LRRK2 RNA guide
auuuuuauccuccuucuaccac

SEQ ID NO: 101875 - RNA, 22 nt, Artificial Sequence
  LRRK2 RNA guide
caaaauuuggcuugaggaaccu

SEQ ID NO: 101876 - RNA, 22 nt, Artificial Sequence
  LRRK2 RNA guide
caaacagaagggagaaugaguu

SEQ ID NO: 101877 - RNA, 22 nt, Artificial Sequence
  LRRK2 RNA guide
caaacucuuguagaguucagca

SEQ ID NO: 101878 - RNA, 22 nt, Artificial Sequence
  LRRK2 RNA guide
caaagauuucuagccuuuaguu

SEQ ID NO: 101879 - RNA, 22 nt, Artificial Sequence
  LRRK2 RNA guide
caaauuuugggaauaaccaaga

SEQ ID NO: 101880 - RNA, 22 nt, Artificial Sequence
  LRRK2 RNA guide
caacaguauggauggugguaga

SEQ ID NO: 101881 - RNA, 22 nt, Artificial Sequence
  LRRK2 RNA guide
caacucauucucccuucuguuu

SEQ ID NO: 101882 - RNA, 22 nt, Artificial Sequence
  LRRK2 RNA guide
caacuuugucacuagcaaacuc

SEQ ID NO: 101883 - RNA, 22 nt, Artificial Sequence
  LRRK2 RNA guide
caagaacucucggcuauauuaa

SEQ ID NO: 101884 - RNA, 22 nt, Artificial Sequence
  LRRK2 RNA guide
caagaguuugcuagugacaaag

SEQ ID NO: 101885 - RNA, 22 nt, Artificial Sequence
  LRRK2 RNA guide
caagccaaauuuugggaauaac

SEQ ID NO: 101886 - RNA, 22 nt, Artificial Sequence
  LRRK2 RNA guide
caagguauacuacaacuaaagg

SEQ ID NO: 101887 - RNA, 22 nt, Artificial Sequence
  LRRK2 RNA guide
caaguaucuucccaauacagag

SEQ ID NO: 101888 - RNA, 22 nt, Artificial Sequence
  LRRK2 RNA guide
caauaacgagacuaaaaccgaa

SEQ ID NO: 101889 - RNA, 22 nt, Artificial Sequence
  LRRK2 RNA guide
caauacagagcauguccuagau

SEQ ID NO: 101890 - RNA, 22 nt, Artificial Sequence
  LRRK2 RNA guide
caauauucccaucuuaaaauca

SEQ ID NO: 101891 - RNA, 22 nt, Artificial Sequence
  LRRK2 RNA guide
caauguaaacgggaugaagagc

SEQ ID NO: 101892 - RNA, 22 nt, Artificial Sequence
  LRRK2 RNA guide
caauguuaauauagccgagagu

SEQ ID NO: 101893 - RNA, 22 nt, Artificial Sequence
  LRRK2 RNA guide
cacagucagagguuccucaagc

SEQ ID NO: 101894 - RNA, 22 nt, Artificial Sequence
  LRRK2 RNA guide
cacauacuggggcucuucaucc

SEQ ID NO: 101895 - RNA, 22 nt, Artificial Sequence
  LRRK2 RNA guide
caccauccauacuguugguuuu

SEQ ID NO: 101896 - RNA, 22 nt, Artificial Sequence
  LRRK2 RNA guide
cacuaaugaauucaucuugcca

SEQ ID NO: 101897 - RNA, 22 nt, Artificial Sequence
  LRRK2 RNA guide
cacuagcaaacucuuguagagu

SEQ ID NO: 101898 - RNA, 22 nt, Artificial Sequence
  LRRK2 RNA guide
cacucagggaacacauacuggg

SEQ ID NO: 101899 - RNA, 22 nt, Artificial Sequence
  LRRK2 RNA guide
cacuucaacucauucucccuuc

SEQ ID NO: 101900 - RNA, 22 nt, Artificial Sequence
  LRRK2 RNA guide
cagaagggagaaugaguugaag

SEQ ID NO: 101901 - RNA, 22 nt, Artificial Sequence
  LRRK2 RNA guide
cagagcauguccuagaugagaa

SEQ ID NO: 101902 - RNA, 22 nt, Artificial Sequence
  LRRK2 RNA guide
cagagguuccucaagccaaauu

SEQ ID NO: 101903 - RNA, 22 nt, Artificial Sequence
  LRRK2 RNA guide
cagggaacacauacuggggcuc

SEQ ID NO: 101904 - RNA, 22 nt, Artificial Sequence
  LRRK2 RNA guide
caguaaaacgucuccuuccaaa

SEQ ID NO: 101905 - RNA, 22 nt, Artificial Sequence
  LRRK2 RNA guide
caguauggauggugguagaagg

SEQ ID NO: 101906 - RNA, 22 nt, Artificial Sequence
  LRRK2 RNA guide
caguauguguucccugaguguc

SEQ ID NO: 101907 - RNA, 22 nt, Artificial Sequence
  LRRK2 RNA guide
cagucagagguuccucaagcca

SEQ ID NO: 101908 - RNA, 22 nt, Artificial Sequence
  LRRK2 RNA guide
cauaaucuucucaucuaggaca

SEQ ID NO: 101909 - RNA, 22 nt, Artificial Sequence
  LRRK2 RNA guide
cauacuggggcucuucaucccg

SEQ ID NO: 101910 - RNA, 22 nt, Artificial Sequence
  LRRK2 RNA guide
caucccguuuacauugcguaau

SEQ ID NO: 101911 - RNA, 22 nt, Artificial Sequence
  LRRK2 RNA guide
caucuaggacaugcucuguauu

SEQ ID NO: 101912 - RNA, 22 nt, Artificial Sequence
  LRRK2 RNA guide
caucuuaaaaucacagucagag

SEQ ID NO: 101913 - RNA, 22 nt, Artificial Sequence
  LRRK2 RNA guide
caucuugccaauaacgagacua

SEQ ID NO: 101914 - RNA, 22 nt, Artificial Sequence
  LRRK2 RNA guide
caugcucuguauugggaagaua

SEQ ID NO: 101915 - RNA, 22 nt, Artificial Sequence
  LRRK2 RNA guide
cauguccuagaugagaagauua

SEQ ID NO: 101916 - RNA, 22 nt, Artificial Sequence
  LRRK2 RNA guide
cauuacgcaauguaaacgggau

SEQ ID NO: 101917 - RNA, 22 nt, Artificial Sequence
  LRRK2 RNA guide
cauuaguguuuagacuugacua

SEQ ID NO: 101918 - RNA, 22 nt, Artificial Sequence
  LRRK2 RNA guide
cauucucccuucuguuuggaag

SEQ ID NO: 101919 - RNA, 22 nt, Artificial Sequence
  LRRK2 RNA guide
cauugccaguaaaacgucuccu

SEQ ID NO: 101920 - RNA, 22 nt, Artificial Sequence
  LRRK2 RNA guide
cauuguuuucacuucaacucau

SEQ ID NO: 101921 - RNA, 22 nt, Artificial Sequence
  LRRK2 RNA guide
cauuuuuauccuccuucuacca

SEQ ID NO: 101922 - RNA, 22 nt, Artificial Sequence
  LRRK2 RNA guide
ccaaaauuuggcuugaggaacc

SEQ ID NO: 101923 - RNA, 22 nt, Artificial Sequence
  LRRK2 RNA guide
ccaaacagaagggagaaugagu

SEQ ID NO: 101924 - RNA, 22 nt, Artificial Sequence
  LRRK2 RNA guide
ccaaauuuugggaauaaccaag

SEQ ID NO: 101925 - RNA, 22 nt, Artificial Sequence
  LRRK2 RNA guide
ccaacaguauggauggugguag

SEQ ID NO: 101926 - RNA, 22 nt, Artificial Sequence
  LRRK2 RNA guide
ccaagaacucucggcuauauua

SEQ ID NO: 101927 - RNA, 22 nt, Artificial Sequence
  LRRK2 RNA guide
ccaaguaucuucccaauacaga

SEQ ID NO: 101928 - RNA, 22 nt, Artificial Sequence
  LRRK2 RNA guide
ccaauaacgagacuaaaaccga

SEQ ID NO: 101929 - RNA, 22 nt, Artificial Sequence
  LRRK2 RNA guide
ccaauacagagcauguccuaga

SEQ ID NO: 101930 - RNA, 22 nt, Artificial Sequence
  LRRK2 RNA guide
ccaccauccauacuguugguuu

SEQ ID NO: 101931 - RNA, 22 nt, Artificial Sequence
  LRRK2 RNA guide
ccaguaaaacgucuccuuccaa

SEQ ID NO: 101932 - RNA, 22 nt, Artificial Sequence
  LRRK2 RNA guide
ccaguauguguucccugagugu

SEQ ID NO: 101933 - RNA, 22 nt, Artificial Sequence
  LRRK2 RNA guide
ccauccauacuguugguuuuau

SEQ ID NO: 101934 - RNA, 22 nt, Artificial Sequence
  LRRK2 RNA guide
ccaucuuaaaaucacagucaga

SEQ ID NO: 101935 - RNA, 22 nt, Artificial Sequence
  LRRK2 RNA guide
ccauuuuuauccuccuucuacc

SEQ ID NO: 101936 - RNA, 22 nt, Artificial Sequence
  LRRK2 RNA guide
cccaaaauuuggcuugaggaac

SEQ ID NO: 101937 - RNA, 22 nt, Artificial Sequence
  LRRK2 RNA guide
cccaauacagagcauguccuag

SEQ ID NO: 101938 - RNA, 22 nt, Artificial Sequence
  LRRK2 RNA guide
cccaguauguguucccugagug

SEQ ID NO: 101939 - RNA, 22 nt, Artificial Sequence
  LRRK2 RNA guide
cccaucuuaaaaucacagucag

SEQ ID NO: 101940 - RNA, 22 nt, Artificial Sequence
  LRRK2 RNA guide
cccauuuuuauccuccuucuac

SEQ ID NO: 101941 - RNA, 22 nt, Artificial Sequence
  LRRK2 RNA guide
ccccaguauguguucccugagu

SEQ ID NO: 101942 - RNA, 22 nt, Artificial Sequence
  LRRK2 RNA guide
ccccuuuuccaaacuauucaua

SEQ ID NO: 101943 - RNA, 22 nt, Artificial Sequence
  LRRK2 RNA guide
cccguuuacauugcguaaugau

SEQ ID NO: 101944 - RNA, 22 nt, Artificial Sequence
  LRRK2 RNA guide
cccugagugucuuuaagaagua

SEQ ID NO: 101945 - RNA, 22 nt, Artificial Sequence
  LRRK2 RNA guide
cccuucuguuuggaaggagacg

SEQ ID NO: 101946 - RNA, 22 nt, Artificial Sequence
  LRRK2 RNA guide
cccuuuuccaaacuauucauaa

SEQ ID NO: 101947 - RNA, 22 nt, Artificial Sequence
  LRRK2 RNA guide
ccgaacccauuuuuauccuccu

SEQ ID NO: 101948 - RNA, 22 nt, Artificial Sequence
  LRRK2 RNA guide
ccgagaguucuugguuauuccc

SEQ ID NO: 101949 - RNA, 22 nt, Artificial Sequence
  LRRK2 RNA guide
ccguuuacauugcguaaugauu

SEQ ID NO: 101950 - RNA, 22 nt, Artificial Sequence
  LRRK2 RNA guide
ccucaagccaaauuuugggaau

SEQ ID NO: 101951 - RNA, 22 nt, Artificial Sequence
  LRRK2 RNA guide
ccuccuucuaccaccauccaua

SEQ ID NO: 101952 - RNA, 22 nt, Artificial Sequence
  LRRK2 RNA guide
ccucugacugugauuuuaagau

SEQ ID NO: 101953 - RNA, 22 nt, Artificial Sequence
  LRRK2 RNA guide
ccugagugucuuuaagaaguaa

SEQ ID NO: 101954 - RNA, 22 nt, Artificial Sequence
  LRRK2 RNA guide
ccuuccaaacagaagggagaau

SEQ ID NO: 101955 - RNA, 22 nt, Artificial Sequence
  LRRK2 RNA guide
ccuucuaccaccauccauacug

SEQ ID NO: 101956 - RNA, 22 nt, Artificial Sequence
  LRRK2 RNA guide
ccuucuguuuggaaggagacgu

SEQ ID NO: 101957 - RNA, 22 nt, Artificial Sequence
  LRRK2 RNA guide
cgaacccauuuuuauccuccuu

SEQ ID NO: 101958 - RNA, 22 nt, Artificial Sequence
  LRRK2 RNA guide
cgagacuaaaaccgaacccauu

SEQ ID NO: 101959 - RNA, 22 nt, Artificial Sequence
  LRRK2 RNA guide
cgagaguucuugguuauuccca

SEQ ID NO: 101960 - RNA, 22 nt, Artificial Sequence
  LRRK2 RNA guide
cgcaauguaaacgggaugaaga

SEQ ID NO: 101961 - RNA, 22 nt, Artificial Sequence
  LRRK2 RNA guide
cggcuauauuaacauugccagu

SEQ ID NO: 101962 - RNA, 22 nt, Artificial Sequence
  LRRK2 RNA guide
cgggaugaagagccccaguaug

SEQ ID NO: 101963 - RNA, 22 nt, Artificial Sequence
  LRRK2 RNA guide
cgguuuuagucucguuauuggc

SEQ ID NO: 101964 - RNA, 22 nt, Artificial Sequence
  LRRK2 RNA guide
cgucuccuuccaaacagaaggg

SEQ ID NO: 101965 - RNA, 22 nt, Artificial Sequence
  LRRK2 RNA guide
cguuauuggcaagaugaauuca

SEQ ID NO: 101966 - RNA, 22 nt, Artificial Sequence
  LRRK2 RNA guide
cguuuuacuggcaauguuaaua

SEQ ID NO: 101967 - RNA, 22 nt, Artificial Sequence
  LRRK2 RNA guide
cuaaaaccgaacccauuuuuau

SEQ ID NO: 101968 - RNA, 22 nt, Artificial Sequence
  LRRK2 RNA guide
cuaaacacuaaugaauucaucu

SEQ ID NO: 101969 - RNA, 22 nt, Artificial Sequence
  LRRK2 RNA guide
cuaaugaauucaucuugccaau

SEQ ID NO: 101970 - RNA, 22 nt, Artificial Sequence
  LRRK2 RNA guide
cuacaacuaaaggcuagaaauc

SEQ ID NO: 101971 - RNA, 22 nt, Artificial Sequence
  LRRK2 RNA guide
cuacaagaguuugcuagugaca

SEQ ID NO: 101972 - RNA, 22 nt, Artificial Sequence
  LRRK2 RNA guide
cuaccaccauccauacuguugg

SEQ ID NO: 101973 - RNA, 22 nt, Artificial Sequence
  LRRK2 RNA guide
cuagcaaacucuuguagaguuc

SEQ ID NO: 101974 - RNA, 22 nt, Artificial Sequence
  LRRK2 RNA guide
cuagccuuuaguuguaguauac

SEQ ID NO: 101975 - RNA, 22 nt, Artificial Sequence
  LRRK2 RNA guide
cuaggacaugcucuguauuggg

SEQ ID NO: 101976 - RNA, 22 nt, Artificial Sequence
  LRRK2 RNA guide
cuagugacaaaguugcauuuua

SEQ ID NO: 101977 - RNA, 22 nt, Artificial Sequence
  LRRK2 RNA guide
cuauauuaacauugccaguaaa

SEQ ID NO: 101978 - RNA, 22 nt, Artificial Sequence
  LRRK2 RNA guide
cuauucauaaucuucucaucua

SEQ ID NO: 101979 - RNA, 22 nt, Artificial Sequence
  LRRK2 RNA guide
cuauuccaaguaucuucccaau

SEQ ID NO: 101980 - RNA, 22 nt, Artificial Sequence
  LRRK2 RNA guide
cucaagccaaauuuugggaaua

SEQ ID NO: 101981 - RNA, 22 nt, Artificial Sequence
  LRRK2 RNA guide
cucagggaacacauacuggggc

SEQ ID NO: 101982 - RNA, 22 nt, Artificial Sequence
  LRRK2 RNA guide
cucaucuaggacaugcucugua

SEQ ID NO: 101983 - RNA, 22 nt, Artificial Sequence
  LRRK2 RNA guide
cucauucucccuucuguuugga

SEQ ID NO: 101984 - RNA, 22 nt, Artificial Sequence
  LRRK2 RNA guide
cucccuucuguuuggaaggaga

SEQ ID NO: 101985 - RNA, 22 nt, Artificial Sequence
  LRRK2 RNA guide
cuccuuccaaacagaagggaga

SEQ ID NO: 101986 - RNA, 22 nt, Artificial Sequence
  LRRK2 RNA guide
cuccuucuaccaccauccauac

SEQ ID NO: 101987 - RNA, 22 nt, Artificial Sequence
  LRRK2 RNA guide
cucggcuauauuaacauugcca

SEQ ID NO: 101988 - RNA, 22 nt, Artificial Sequence
  LRRK2 RNA guide
cucguuauuggcaagaugaauu

SEQ ID NO: 101989 - RNA, 22 nt, Artificial Sequence
  LRRK2 RNA guide
cucuacaagaguuugcuaguga

SEQ ID NO: 101990 - RNA, 22 nt, Artificial Sequence
  LRRK2 RNA guide
cucucggcuauauuaacauugc

SEQ ID NO: 101991 - RNA, 22 nt, Artificial Sequence
  LRRK2 RNA guide
cucugacugugauuuuaagaug

SEQ ID NO: 101992 - RNA, 22 nt, Artificial Sequence
  LRRK2 RNA guide
cucuguauugggaagauacuug

SEQ ID NO: 101993 - RNA, 22 nt, Artificial Sequence
  LRRK2 RNA guide
cucuucaucccguuuacauugc

SEQ ID NO: 101994 - RNA, 22 nt, Artificial Sequence
  LRRK2 RNA guide
cucuuguagaguucagcacuuu

SEQ ID NO: 101995 - RNA, 22 nt, Artificial Sequence
  LRRK2 RNA guide
cugaacucuacaagaguuugcu

SEQ ID NO: 101996 - RNA, 22 nt, Artificial Sequence
  LRRK2 RNA guide
cugacugugauuuuaagauggg

SEQ ID NO: 101997 - RNA, 22 nt, Artificial Sequence
  LRRK2 RNA guide
cuggcaauguuaauauagccga

SEQ ID NO: 101998 - RNA, 22 nt, Artificial Sequence
  LRRK2 RNA guide
cuggggcucuucaucccguuua

SEQ ID NO: 101999 - RNA, 22 nt, Artificial Sequence
  LRRK2 RNA guide
cuguauugggaagauacuugga

SEQ ID NO: 102000 - RNA, 22 nt, Artificial Sequence
  LRRK2 RNA guide
cuguuuggaaggagacguuuua

SEQ ID NO: 102001 - RNA, 22 nt, Artificial Sequence
  LRRK2 RNA guide
cuuaaaaucacagucagagguu

SEQ ID NO: 102002 - RNA, 22 nt, Artificial Sequence
  LRRK2 RNA guide
cuuaaagacacucagggaacac

SEQ ID NO: 102003 - RNA, 22 nt, Artificial Sequence
  LRRK2 RNA guide
cuucaacucauucucccuucug

SEQ ID NO: 102004 - RNA, 22 nt, Artificial Sequence
  LRRK2 RNA guide
cuucaucccguuuacauugcgu

SEQ ID NO: 102005 - RNA, 22 nt, Artificial Sequence
  LRRK2 RNA guide
cuuccaaacagaagggagaaug

SEQ ID NO: 102006 - RNA, 22 nt, Artificial Sequence
  LRRK2 RNA guide
cuucccaauacagagcaugucc

SEQ ID NO: 102007 - RNA, 22 nt, Artificial Sequence
  LRRK2 RNA guide
cuucuaccaccauccauacugu

SEQ ID NO: 102008 - RNA, 22 nt, Artificial Sequence
  LRRK2 RNA guide
cuucucaucuaggacaugcucu

SEQ ID NO: 102009 - RNA, 22 nt, Artificial Sequence
  LRRK2 RNA guide
cuucuguuuggaaggagacguu

SEQ ID NO: 102010 - RNA, 22 nt, Artificial Sequence
  LRRK2 RNA guide
cuucuuaaagacacucagggaa

SEQ ID NO: 102011 - RNA, 22 nt, Artificial Sequence
  LRRK2 RNA guide
cuugacuauuccaaguaucuuc

SEQ ID NO: 102012 - RNA, 22 nt, Artificial Sequence
  LRRK2 RNA guide
cuugaggaaccucugacuguga

SEQ ID NO: 102013 - RNA, 22 nt, Artificial Sequence
  LRRK2 RNA guide
cuugccaauaacgagacuaaaa

SEQ ID NO: 102014 - RNA, 22 nt, Artificial Sequence
  LRRK2 RNA guide
cuuggaauagucaagucuaaac

SEQ ID NO: 102015 - RNA, 22 nt, Artificial Sequence
  LRRK2 RNA guide
cuugguuauucccaaaauuugg

SEQ ID NO: 102016 - RNA, 22 nt, Artificial Sequence
  LRRK2 RNA guide
cuuuauaaaaccaacaguaugg

SEQ ID NO: 102017 - RNA, 22 nt, Artificial Sequence
  LRRK2 RNA guide
cuuugucacuagcaaacucuug

SEQ ID NO: 102018 - RNA, 22 nt, Artificial Sequence
  LRRK2 RNA guide
gaacacauacuggggcucuuca

SEQ ID NO: 102019 - RNA, 22 nt, Artificial Sequence
  LRRK2 RNA guide
gaacccauuuuuauccuccuuc

SEQ ID NO: 102020 - RNA, 22 nt, Artificial Sequence
  LRRK2 RNA guide
gaaccucugacugugauuuuaa

SEQ ID NO: 102021 - RNA, 22 nt, Artificial Sequence
  LRRK2 RNA guide
gaacucuacaagaguuugcuag

SEQ ID NO: 102022 - RNA, 22 nt, Artificial Sequence
  LRRK2 RNA guide
gaacucucggcuauauuaacau

SEQ ID NO: 102023 - RNA, 22 nt, Artificial Sequence
  LRRK2 RNA guide
gaagagccccaguauguguucc

SEQ ID NO: 102024 - RNA, 22 nt, Artificial Sequence
  LRRK2 RNA guide
gaagauacuuggaauagucaag

SEQ ID NO: 102025 - RNA, 22 nt, Artificial Sequence
  LRRK2 RNA guide
gaagauuaugaauaguuuggaa

SEQ ID NO: 102026 - RNA, 22 nt, Artificial Sequence
  LRRK2 RNA guide
gaaggagacguuuuacuggcaa

SEQ ID NO: 102027 - RNA, 22 nt, Artificial Sequence
  LRRK2 RNA guide
gaaggaggauaaaaauggguuc

SEQ ID NO: 102028 - RNA, 22 nt, Artificial Sequence
  LRRK2 RNA guide
gaagggagaaugaguugaagug

SEQ ID NO: 102029 - RNA, 22 nt, Artificial Sequence
  LRRK2 RNA guide
gaauaaccaagaacucucggcu

SEQ ID NO: 102030 - RNA, 22 nt, Artificial Sequence
  LRRK2 RNA guide
gaaugaguugaagugaaaacaa

SEQ ID NO: 102031 - RNA, 22 nt, Artificial Sequence
  LRRK2 RNA guide
gaauucaucuugccaauaacga

SEQ ID NO: 102032 - RNA, 22 nt, Artificial Sequence
  LRRK2 RNA guide
gacacucagggaacacauacug

SEQ ID NO: 102033 - RNA, 22 nt, Artificial Sequence
  LRRK2 RNA guide
gacaugcucuguauugggaaga

SEQ ID NO: 102034 - RNA, 22 nt, Artificial Sequence
  LRRK2 RNA guide
gacguuuuacuggcaauguuaa

SEQ ID NO: 102035 - RNA, 22 nt, Artificial Sequence
  LRRK2 RNA guide
gacuaaaaccgaacccauuuuu

SEQ ID NO: 102036 - RNA, 22 nt, Artificial Sequence
  LRRK2 RNA guide
gacuauuccaaguaucuuccca

SEQ ID NO: 102037 - RNA, 22 nt, Artificial Sequence
  LRRK2 RNA guide
gacugugauuuuaagaugggaa

SEQ ID NO: 102038 - RNA, 22 nt, Artificial Sequence
  LRRK2 RNA guide
gacuugacuauuccaaguaucu

SEQ ID NO: 102039 - RNA, 22 nt, Artificial Sequence
  LRRK2 RNA guide
gagaaugaguugaagugaaaac

SEQ ID NO: 102040 - RNA, 22 nt, Artificial Sequence
  LRRK2 RNA guide
gagacguuuuacuggcaauguu

SEQ ID NO: 102041 - RNA, 22 nt, Artificial Sequence
  LRRK2 RNA guide
gagacuaaaaccgaacccauuu

SEQ ID NO: 102042 - RNA, 22 nt, Artificial Sequence
  LRRK2 RNA guide
gagaguucuugguuauucccaa

SEQ ID NO: 102043 - RNA, 22 nt, Artificial Sequence
  LRRK2 RNA guide
gagcauguccuagaugagaaga

SEQ ID NO: 102044 - RNA, 22 nt, Artificial Sequence
  LRRK2 RNA guide
gagccccaguauguguucccug

SEQ ID NO: 102045 - RNA, 22 nt, Artificial Sequence
  LRRK2 RNA guide
gaggaaccucugacugugauuu

SEQ ID NO: 102046 - RNA, 22 nt, Artificial Sequence
  LRRK2 RNA guide
gaggauaaaaauggguucgguu

SEQ ID NO: 102047 - RNA, 22 nt, Artificial Sequence
  LRRK2 RNA guide
gagguuccucaagccaaauuuu

SEQ ID NO: 102048 - RNA, 22 nt, Artificial Sequence
  LRRK2 RNA guide
gaguucuugguuauucccaaaa

SEQ ID NO: 102049 - RNA, 22 nt, Artificial Sequence
  LRRK2 RNA guide
gaguugaagugaaaacaaugcc

SEQ ID NO: 102050 - RNA, 22 nt, Artificial Sequence
  LRRK2 RNA guide
gaguuugcuagugacaaaguug

SEQ ID NO: 102051 - RNA, 22 nt, Artificial Sequence
  LRRK2 RNA guide
gauaaaaauggguucgguuuua

SEQ ID NO: 102052 - RNA, 22 nt, Artificial Sequence
  LRRK2 RNA guide
gauaaaaugcaacuuugucacu

SEQ ID NO: 102053 - RNA, 22 nt, Artificial Sequence
  LRRK2 RNA guide
gauacuuggaauagucaagucu

SEQ ID NO: 102054 - RNA, 22 nt, Artificial Sequence
  LRRK2 RNA guide
gaugaagagccccaguaugugu

SEQ ID NO: 102055 - RNA, 22 nt, Artificial Sequence
  LRRK2 RNA guide
gaugggaauauuguuaaaucau

SEQ ID NO: 102056 - RNA, 22 nt, Artificial Sequence
  LRRK2 RNA guide
gauggugguagaaggaggauaa

SEQ ID NO: 102057 - RNA, 22 nt, Artificial Sequence
  LRRK2 RNA guide
gauuaugaauaguuuggaaaag

SEQ ID NO: 102058 - RNA, 22 nt, Artificial Sequence
  LRRK2 RNA guide
gauuucuagccuuuaguuguag

SEQ ID NO: 102059 - RNA, 22 nt, Artificial Sequence
  LRRK2 RNA guide
gcaaacucuuguagaguucagc

SEQ ID NO: 102060 - RNA, 22 nt, Artificial Sequence
  LRRK2 RNA guide
gcaacuuugucacuagcaaacu

SEQ ID NO: 102061 - RNA, 22 nt, Artificial Sequence
  LRRK2 RNA guide
gcaagaugaauucauuaguguu

SEQ ID NO: 102062 - RNA, 22 nt, Artificial Sequence
  LRRK2 RNA guide
gcaauguaaacgggaugaagag

SEQ ID NO: 102063 - RNA, 22 nt, Artificial Sequence
  LRRK2 RNA guide
gcaauguuaauauagccgagag

SEQ ID NO: 102064 - RNA, 22 nt, Artificial Sequence
  LRRK2 RNA guide
gcauguccuagaugagaagauu

SEQ ID NO: 102065 - RNA, 22 nt, Artificial Sequence
  LRRK2 RNA guide
gcauuguuuucacuucaacuca

SEQ ID NO: 102066 - RNA, 22 nt, Artificial Sequence
  LRRK2 RNA guide
gccaaauuuugggaauaaccaa

SEQ ID NO: 102067 - RNA, 22 nt, Artificial Sequence
  LRRK2 RNA guide
gccaauaacgagacuaaaaccg

SEQ ID NO: 102068 - RNA, 22 nt, Artificial Sequence
  LRRK2 RNA guide
gccaguaaaacgucuccuucca

SEQ ID NO: 102069 - RNA, 22 nt, Artificial Sequence
  LRRK2 RNA guide
gccccaguauguguucccugag

SEQ ID NO: 102070 - RNA, 22 nt, Artificial Sequence
  LRRK2 RNA guide
gccgagaguucuugguuauucc

SEQ ID NO: 102071 - RNA, 22 nt, Artificial Sequence
  LRRK2 RNA guide
gcguaaugauuuaacaauauuc

SEQ ID NO: 102072 - RNA, 22 nt, Artificial Sequence
  LRRK2 RNA guide
gcuagugacaaaguugcauuuu

SEQ ID NO: 102073 - RNA, 22 nt, Artificial Sequence
  LRRK2 RNA guide
gcuauauuaacauugccaguaa

SEQ ID NO: 102074 - RNA, 22 nt, Artificial Sequence
  LRRK2 RNA guide
gcucuguauugggaagauacuu

SEQ ID NO: 102075 - RNA, 22 nt, Artificial Sequence
  LRRK2 RNA guide
gcucuucaucccguuuacauug

SEQ ID NO: 102076 - RNA, 22 nt, Artificial Sequence
  LRRK2 RNA guide
gcugaacucuacaagaguuugc

SEQ ID NO: 102077 - RNA, 22 nt, Artificial Sequence
  LRRK2 RNA guide
gcuugaggaaccucugacugug

SEQ ID NO: 102078 - RNA, 22 nt, Artificial Sequence
  LRRK2 RNA guide
ggaacacauacuggggcucuuc

SEQ ID NO: 102079 - RNA, 22 nt, Artificial Sequence
  LRRK2 RNA guide
ggaaccucugacugugauuuua

SEQ ID NO: 102080 - RNA, 22 nt, Artificial Sequence
  LRRK2 RNA guide
ggaagauacuuggaauagucaa

SEQ ID NO: 102081 - RNA, 22 nt, Artificial Sequence
  LRRK2 RNA guide
ggaaggagacguuuuacuggca

SEQ ID NO: 102082 - RNA, 22 nt, Artificial Sequence
  LRRK2 RNA guide
ggaauaaccaagaacucucggc

SEQ ID NO: 102083 - RNA, 22 nt, Artificial Sequence
  LRRK2 RNA guide
ggaauagucaagucuaaacacu

SEQ ID NO: 102084 - RNA, 22 nt, Artificial Sequence
  LRRK2 RNA guide
ggacaugcucuguauugggaag

SEQ ID NO: 102085 - RNA, 22 nt, Artificial Sequence
  LRRK2 RNA guide
ggagaaugaguugaagugaaaa

SEQ ID NO: 102086 - RNA, 22 nt, Artificial Sequence
  LRRK2 RNA guide
ggagacguuuuacuggcaaugu

SEQ ID NO: 102087 - RNA, 22 nt, Artificial Sequence
  LRRK2 RNA guide
ggaggauaaaaauggguucggu

SEQ ID NO: 102088 - RNA, 22 nt, Artificial Sequence
  LRRK2 RNA guide
ggauaaaaauggguucgguuuu

SEQ ID NO: 102089 - RNA, 22 nt, Artificial Sequence
  LRRK2 RNA guide
ggaugaagagccccaguaugug

SEQ ID NO: 102090 - RNA, 22 nt, Artificial Sequence
  LRRK2 RNA guide
ggauggugguagaaggaggaua

SEQ ID NO: 102091 - RNA, 22 nt, Artificial Sequence
  LRRK2 RNA guide
ggcaagaugaauucauuagugu

SEQ ID NO: 102092 - RNA, 22 nt, Artificial Sequence
  LRRK2 RNA guide
ggcaauguuaauauagccgaga

SEQ ID NO: 102093 - RNA, 22 nt, Artificial Sequence
  LRRK2 RNA guide
ggcauuguuuucacuucaacuc

SEQ ID NO: 102094 - RNA, 22 nt, Artificial Sequence
  LRRK2 RNA guide
ggcuauauuaacauugccagua

SEQ ID NO: 102095 - RNA, 22 nt, Artificial Sequence
  LRRK2 RNA guide
ggcucuucaucccguuuacauu

SEQ ID NO: 102096 - RNA, 22 nt, Artificial Sequence
  LRRK2 RNA guide
ggcuugaggaaccucugacugu

SEQ ID NO: 102097 - RNA, 22 nt, Artificial Sequence
  LRRK2 RNA guide
gggaacacauacuggggcucuu

SEQ ID NO: 102098 - RNA, 22 nt, Artificial Sequence
  LRRK2 RNA guide
gggaagauacuuggaauaguca

SEQ ID NO: 102099 - RNA, 22 nt, Artificial Sequence
  LRRK2 RNA guide
gggaauaaccaagaacucucgg

SEQ ID NO: 102100 - RNA, 22 nt, Artificial Sequence
  LRRK2 RNA guide
gggagaaugaguugaagugaaa

SEQ ID NO: 102101 - RNA, 22 nt, Artificial Sequence
  LRRK2 RNA guide
gggaugaagagccccaguaugu

SEQ ID NO: 102102 - RNA, 22 nt, Artificial Sequence
  LRRK2 RNA guide
gggcucuucaucccguuuacau

SEQ ID NO: 102103 - RNA, 22 nt, Artificial Sequence
  LRRK2 RNA guide
ggggcucuucaucccguuuaca

SEQ ID NO: 102104 - RNA, 22 nt, Artificial Sequence
  LRRK2 RNA guide
ggguucgguuuuagucucguua

SEQ ID NO: 102105 - RNA, 22 nt, Artificial Sequence
  LRRK2 RNA guide
gguagaaggaggauaaaaaugg

SEQ ID NO: 102106 - RNA, 22 nt, Artificial Sequence
  LRRK2 RNA guide
gguauacuacaacuaaaggcua

SEQ ID NO: 102107 - RNA, 22 nt, Artificial Sequence
  LRRK2 RNA guide
ggugguagaaggaggauaaaaa

SEQ ID NO: 102108 - RNA, 22 nt, Artificial Sequence
  LRRK2 RNA guide
gguuauucccaaaauuuggcuu

SEQ ID NO: 102109 - RNA, 22 nt, Artificial Sequence
  LRRK2 RNA guide
gguuccucaagccaaauuuugg

SEQ ID NO: 102110 - RNA, 22 nt, Artificial Sequence
  LRRK2 RNA guide
gguucgguuuuagucucguuau

SEQ ID NO: 102111 - RNA, 22 nt, Artificial Sequence
  LRRK2 RNA guide
gguuuuagucucguuauuggca

SEQ ID NO: 102112 - RNA, 22 nt, Artificial Sequence
  LRRK2 RNA guide
guaaaacgucuccuuccaaaca

SEQ ID NO: 102113 - RNA, 22 nt, Artificial Sequence
  LRRK2 RNA guide
guaaacgggaugaagagcccca

SEQ ID NO: 102114 - RNA, 22 nt, Artificial Sequence
  LRRK2 RNA guide
guaaaggcauuguuuucacuuc

SEQ ID NO: 102115 - RNA, 22 nt, Artificial Sequence
  LRRK2 RNA guide
guagaaggaggauaaaaauggg

SEQ ID NO: 102116 - RNA, 22 nt, Artificial Sequence
  LRRK2 RNA guide
guauacuacaacuaaaggcuag

SEQ ID NO: 102117 - RNA, 22 nt, Artificial Sequence
  LRRK2 RNA guide
guaucuucccaauacagagcau

SEQ ID NO: 102118 - RNA, 22 nt, Artificial Sequence
  LRRK2 RNA guide
guauggauggugguagaaggag

SEQ ID NO: 102119 - RNA, 22 nt, Artificial Sequence
  LRRK2 RNA guide
guauguguucccugagugucuu

SEQ ID NO: 102120 - RNA, 22 nt, Artificial Sequence
  LRRK2 RNA guide
guauugggaagauacuuggaau

SEQ ID NO: 102121 - RNA, 22 nt, Artificial Sequence
  LRRK2 RNA guide
gucacuagcaaacucuuguaga

SEQ ID NO: 102122 - RNA, 22 nt, Artificial Sequence
  LRRK2 RNA guide
gucagagguuccucaagccaaa

SEQ ID NO: 102123 - RNA, 22 nt, Artificial Sequence
  LRRK2 RNA guide
guccuagaugagaagauuauga

SEQ ID NO: 102124 - RNA, 22 nt, Artificial Sequence
  LRRK2 RNA guide
gucuaaacacuaaugaauucau

SEQ ID NO: 102125 - RNA, 22 nt, Artificial Sequence
  LRRK2 RNA guide
gucuccuuccaaacagaaggga

SEQ ID NO: 102126 - RNA, 22 nt, Artificial Sequence
  LRRK2 RNA guide
gucucguuauuggcaagaugaa

SEQ ID NO: 102127 - RNA, 22 nt, Artificial Sequence
  LRRK2 RNA guide
gugauaaaaugcaacuuuguca

SEQ ID NO: 102128 - RNA, 22 nt, Artificial Sequence
  LRRK2 RNA guide
gugcugaacucuacaagaguuu

SEQ ID NO: 102129 - RNA, 22 nt, Artificial Sequence
  LRRK2 RNA guide
gugguagaaggaggauaaaaau

SEQ ID NO: 102130 - RNA, 22 nt, Artificial Sequence
  LRRK2 RNA guide
guguucccugagugucuuuaag

SEQ ID NO: 102131 - RNA, 22 nt, Artificial Sequence
  LRRK2 RNA guide
guguuuagacuugacuauucca

SEQ ID NO: 102132 - RNA, 22 nt, Artificial Sequence
  LRRK2 RNA guide
guuaaaucauuacgcaauguaa

SEQ ID NO: 102133 - RNA, 22 nt, Artificial Sequence
  LRRK2 RNA guide
guuaauauagccgagaguucuu

SEQ ID NO: 102134 - RNA, 22 nt, Artificial Sequence
  LRRK2 RNA guide
guuacuucuuaaagacacucag

SEQ ID NO: 102135 - RNA, 22 nt, Artificial Sequence
  LRRK2 RNA guide
guuauucccaaaauuuggcuug

SEQ ID NO: 102136 - RNA, 22 nt, Artificial Sequence
  LRRK2 RNA guide
guuauuggcaagaugaauucau

SEQ ID NO: 102137 - RNA, 22 nt, Artificial Sequence
  LRRK2 RNA guide
guucccugagugucuuuaagaa

SEQ ID NO: 102138 - RNA, 22 nt, Artificial Sequence
  LRRK2 RNA guide
guuccucaagccaaauuuuggg

SEQ ID NO: 102139 - RNA, 22 nt, Artificial Sequence
  LRRK2 RNA guide
guucgguuuuagucucguuauu

SEQ ID NO: 102140 - RNA, 22 nt, Artificial Sequence
  LRRK2 RNA guide
guucuugguuauucccaaaauu

SEQ ID NO: 102141 - RNA, 22 nt, Artificial Sequence
  LRRK2 RNA guide
guuuagacuugacuauuccaag

SEQ ID NO: 102142 - RNA, 22 nt, Artificial Sequence
  LRRK2 RNA guide
guuugcuagugacaaaguugca

SEQ ID NO: 102143 - RNA, 22 nt, Artificial Sequence
  LRRK2 RNA guide
guuuggaaggagacguuuuacu

SEQ ID NO: 102144 - RNA, 22 nt, Artificial Sequence
  LRRK2 RNA guide
guuuuacuggcaauguuaauau

SEQ ID NO: 102145 - RNA, 22 nt, Artificial Sequence
  LRRK2 RNA guide
guuuuagucucguuauuggcaa

SEQ ID NO: 102146 - RNA, 22 nt, Artificial Sequence
  LRRK2 RNA guide
guuuucacuucaacucauucuc

SEQ ID NO: 102147 - RNA, 22 nt, Artificial Sequence
  LRRK2 RNA guide
uaaaaagugcugaacucuacaa

SEQ ID NO: 102148 - RNA, 22 nt, Artificial Sequence
  LRRK2 RNA guide
uaaaaauggguucgguuuuagu

SEQ ID NO: 102149 - RNA, 22 nt, Artificial Sequence
  LRRK2 RNA guide
uaaaaccaacaguauggauggu

SEQ ID NO: 102150 - RNA, 22 nt, Artificial Sequence
  LRRK2 RNA guide
uaaaaccgaacccauuuuuauc

SEQ ID NO: 102151 - RNA, 22 nt, Artificial Sequence
  LRRK2 RNA guide
uaaaacgucuccuuccaaacag

SEQ ID NO: 102152 - RNA, 22 nt, Artificial Sequence
  LRRK2 RNA guide
uaaaaucacagucagagguucc

SEQ ID NO: 102153 - RNA, 22 nt, Artificial Sequence
  LRRK2 RNA guide
uaaaaugcaacuuugucacuag

SEQ ID NO: 102154 - RNA, 22 nt, Artificial Sequence
  LRRK2 RNA guide
uaaacgggaugaagagccccag

SEQ ID NO: 102155 - RNA, 22 nt, Artificial Sequence
  LRRK2 RNA guide
uaaagacacucagggaacacau

SEQ ID NO: 102156 - RNA, 22 nt, Artificial Sequence
  LRRK2 RNA guide
uaaaggcauuguuuucacuuca

SEQ ID NO: 102157 - RNA, 22 nt, Artificial Sequence
  LRRK2 RNA guide
uaaaguuacuucuuaaagacac

SEQ ID NO: 102158 - RNA, 22 nt, Artificial Sequence
  LRRK2 RNA guide
uaaaucauuacgcaauguaaac

SEQ ID NO: 102159 - RNA, 22 nt, Artificial Sequence
  LRRK2 RNA guide
uaacauugccaguaaaacgucu

SEQ ID NO: 102160 - RNA, 22 nt, Artificial Sequence
  LRRK2 RNA guide
uaaccaagaacucucggcuaua

SEQ ID NO: 102161 - RNA, 22 nt, Artificial Sequence
  LRRK2 RNA guide
uaacgagacuaaaaccgaaccc

SEQ ID NO: 102162 - RNA, 22 nt, Artificial Sequence
  LRRK2 RNA guide
uaauauagccgagaguucuugg

SEQ ID NO: 102163 - RNA, 22 nt, Artificial Sequence
  LRRK2 RNA guide
uaaucuucucaucuaggacaug

SEQ ID NO: 102164 - RNA, 22 nt, Artificial Sequence
  LRRK2 RNA guide
uaaugaauucaucuugccaaua

SEQ ID NO: 102165 - RNA, 22 nt, Artificial Sequence
  LRRK2 RNA guide
uacaagaguuugcuagugacaa

SEQ ID NO: 102166 - RNA, 22 nt, Artificial Sequence
  LRRK2 RNA guide
uacagagcauguccuagaugag

SEQ ID NO: 102167 - RNA, 22 nt, Artificial Sequence
  LRRK2 RNA guide
uaccaccauccauacuguuggu

SEQ ID NO: 102168 - RNA, 22 nt, Artificial Sequence
  LRRK2 RNA guide
uacgcaauguaaacgggaugaa

SEQ ID NO: 102169 - RNA, 22 nt, Artificial Sequence
  LRRK2 RNA guide
uacuggcaauguuaauauagcc

SEQ ID NO: 102170 - RNA, 22 nt, Artificial Sequence
  LRRK2 RNA guide
uacuggggcucuucaucccguu

SEQ ID NO: 102171 - RNA, 22 nt, Artificial Sequence
  LRRK2 RNA guide
uacuucuuaaagacacucaggg

SEQ ID NO: 102172 - RNA, 22 nt, Artificial Sequence
  LRRK2 RNA guide
uacuuggaauagucaagucuaa

SEQ ID NO: 102173 - RNA, 22 nt, Artificial Sequence
  LRRK2 RNA guide
uagaaggaggauaaaaaugggu

SEQ ID NO: 102174 - RNA, 22 nt, Artificial Sequence
  LRRK2 RNA guide
uagacuugacuauuccaaguau

SEQ ID NO: 102175 - RNA, 22 nt, Artificial Sequence
  LRRK2 RNA guide
uagcaaacucuuguagaguuca

SEQ ID NO: 102176 - RNA, 22 nt, Artificial Sequence
  LRRK2 RNA guide
uagccgagaguucuugguuauu

SEQ ID NO: 102177 - RNA, 22 nt, Artificial Sequence
  LRRK2 RNA guide
uaggacaugcucuguauuggga

SEQ ID NO: 102178 - RNA, 22 nt, Artificial Sequence
  LRRK2 RNA guide
uagucucguuauuggcaagaug

SEQ ID NO: 102179 - RNA, 22 nt, Artificial Sequence
  LRRK2 RNA guide
uaguguuuagacuugacuauuc

SEQ ID NO: 102180 - RNA, 22 nt, Artificial Sequence
  LRRK2 RNA guide
uauaaaaccaacaguauggaug

SEQ ID NO: 102181 - RNA, 22 nt, Artificial Sequence
  LRRK2 RNA guide
uauagccgagaguucuugguua

SEQ ID NO: 102182 - RNA, 22 nt, Artificial Sequence
  LRRK2 RNA guide
uauccuccuucuaccaccaucc

SEQ ID NO: 102183 - RNA, 22 nt, Artificial Sequence
  LRRK2 RNA guide
uaucuucccaauacagagcaug

SEQ ID NO: 102184 - RNA, 22 nt, Artificial Sequence
  LRRK2 RNA guide
uauggauggugguagaaggagg

SEQ ID NO: 102185 - RNA, 22 nt, Artificial Sequence
  LRRK2 RNA guide
uauguguucccugagugucuuu

SEQ ID NO: 102186 - RNA, 22 nt, Artificial Sequence
  LRRK2 RNA guide
uauuaacauugccaguaaaacg

SEQ ID NO: 102187 - RNA, 22 nt, Artificial Sequence
  LRRK2 RNA guide
uauuccaaguaucuucccaaua

SEQ ID NO: 102188 - RNA, 22 nt, Artificial Sequence
  LRRK2 RNA guide
uauucccaaaauuuggcuugag

SEQ ID NO: 102189 - RNA, 22 nt, Artificial Sequence
  LRRK2 RNA guide
uauucccaucuuaaaaucacag

SEQ ID NO: 102190 - RNA, 22 nt, Artificial Sequence
  LRRK2 RNA guide
uauugggaagauacuuggaaua

SEQ ID NO: 102191 - RNA, 22 nt, Artificial Sequence
  LRRK2 RNA guide
ucaaagauuucuagccuuuagu

SEQ ID NO: 102192 - RNA, 22 nt, Artificial Sequence
  LRRK2 RNA guide
ucaacucauucucccuucuguu

SEQ ID NO: 102193 - RNA, 22 nt, Artificial Sequence
  LRRK2 RNA guide
ucaagccaaauuuugggaauaa

SEQ ID NO: 102194 - RNA, 22 nt, Artificial Sequence
  LRRK2 RNA guide
ucacagucagagguuccucaag

SEQ ID NO: 102195 - RNA, 22 nt, Artificial Sequence
  LRRK2 RNA guide
ucacuagcaaacucuuguagag

SEQ ID NO: 102196 - RNA, 22 nt, Artificial Sequence
  LRRK2 RNA guide
ucacuucaacucauucucccuu

SEQ ID NO: 102197 - RNA, 22 nt, Artificial Sequence
  LRRK2 RNA guide
ucagagguuccucaagccaaau

SEQ ID NO: 102198 - RNA, 22 nt, Artificial Sequence
  LRRK2 RNA guide
ucagggaacacauacuggggcu

SEQ ID NO: 102199 - RNA, 22 nt, Artificial Sequence
  LRRK2 RNA guide
ucauaaucuucucaucuaggac

SEQ ID NO: 102200 - RNA, 22 nt, Artificial Sequence
  LRRK2 RNA guide
ucaucccguuuacauugcguaa

SEQ ID NO: 102201 - RNA, 22 nt, Artificial Sequence
  LRRK2 RNA guide
ucaucuaggacaugcucuguau

SEQ ID NO: 102202 - RNA, 22 nt, Artificial Sequence
  LRRK2 RNA guide
ucaucuugccaauaacgagacu

SEQ ID NO: 102203 - RNA, 22 nt, Artificial Sequence
  LRRK2 RNA guide
ucauuacgcaauguaaacggga

SEQ ID NO: 102204 - RNA, 22 nt, Artificial Sequence
  LRRK2 RNA guide
ucauuaguguuuagacuugacu

SEQ ID NO: 102205 - RNA, 22 nt, Artificial Sequence
  LRRK2 RNA guide
ucauucucccuucuguuuggaa

SEQ ID NO: 102206 - RNA, 22 nt, Artificial Sequence
  LRRK2 RNA guide
uccaaacagaagggagaaugag

SEQ ID NO: 102207 - RNA, 22 nt, Artificial Sequence
  LRRK2 RNA guide
uccaaguaucuucccaauacag

SEQ ID NO: 102208 - RNA, 22 nt, Artificial Sequence
  LRRK2 RNA guide
ucccaaaauuuggcuugaggaa

SEQ ID NO: 102209 - RNA, 22 nt, Artificial Sequence
  LRRK2 RNA guide
ucccaauacagagcauguccua

SEQ ID NO: 102210 - RNA, 22 nt, Artificial Sequence
  LRRK2 RNA guide
ucccaucuuaaaaucacaguca

SEQ ID NO: 102211 - RNA, 22 nt, Artificial Sequence
  LRRK2 RNA guide
uccccuuuuccaaacuauucau

SEQ ID NO: 102212 - RNA, 22 nt, Artificial Sequence
  LRRK2 RNA guide
ucccguuuacauugcguaauga

SEQ ID NO: 102213 - RNA, 22 nt, Artificial Sequence
  LRRK2 RNA guide
ucccugagugucuuuaagaagu

SEQ ID NO: 102214 - RNA, 22 nt, Artificial Sequence
  LRRK2 RNA guide
ucccuucuguuuggaaggagac

SEQ ID NO: 102215 - RNA, 22 nt, Artificial Sequence
  LRRK2 RNA guide
uccucaagccaaauuuugggaa

SEQ ID NO: 102216 - RNA, 22 nt, Artificial Sequence
  LRRK2 RNA guide
uccuccuucuaccaccauccau

SEQ ID NO: 102217 - RNA, 22 nt, Artificial Sequence
  LRRK2 RNA guide
uccuuccaaacagaagggagaa

SEQ ID NO: 102218 - RNA, 22 nt, Artificial Sequence
  LRRK2 RNA guide
uccuucuaccaccauccauacu

SEQ ID NO: 102219 - RNA, 22 nt, Artificial Sequence
  LRRK2 RNA guide
ucggcuauauuaacauugccag

SEQ ID NO: 102220 - RNA, 22 nt, Artificial Sequence
  LRRK2 RNA guide
ucgguuuuagucucguuauugg

SEQ ID NO: 102221 - RNA, 22 nt, Artificial Sequence
  LRRK2 RNA guide
ucguuauuggcaagaugaauuc

SEQ ID NO: 102222 - RNA, 22 nt, Artificial Sequence
  LRRK2 RNA guide
ucuaaacacuaaugaauucauc

SEQ ID NO: 102223 - RNA, 22 nt, Artificial Sequence
  LRRK2 RNA guide
ucuacaagaguuugcuagugac

SEQ ID NO: 102224 - RNA, 22 nt, Artificial Sequence
  LRRK2 RNA guide
ucuaccaccauccauacuguug

SEQ ID NO: 102225 - RNA, 22 nt, Artificial Sequence
  LRRK2 RNA guide
ucuagccuuuaguuguaguaua

SEQ ID NO: 102226 - RNA, 22 nt, Artificial Sequence
  LRRK2 RNA guide
ucuaggacaugcucuguauugg

SEQ ID NO: 102227 - RNA, 22 nt, Artificial Sequence
  LRRK2 RNA guide
ucucaucuaggacaugcucugu

SEQ ID NO: 102228 - RNA, 22 nt, Artificial Sequence
  LRRK2 RNA guide
ucucccuucuguuuggaaggag

SEQ ID NO: 102229 - RNA, 22 nt, Artificial Sequence
  LRRK2 RNA guide
ucuccuuccaaacagaagggag

SEQ ID NO: 102230 - RNA, 22 nt, Artificial Sequence
  LRRK2 RNA guide
ucucggcuauauuaacauugcc

SEQ ID NO: 102231 - RNA, 22 nt, Artificial Sequence
  LRRK2 RNA guide
ucucguuauuggcaagaugaau

SEQ ID NO: 102232 - RNA, 22 nt, Artificial Sequence
  LRRK2 RNA guide
ucugacugugauuuuaagaugg

SEQ ID NO: 102233 - RNA, 22 nt, Artificial Sequence
  LRRK2 RNA guide
ucuguauugggaagauacuugg

SEQ ID NO: 102234 - RNA, 22 nt, Artificial Sequence
  LRRK2 RNA guide
ucuguuuggaaggagacguuuu

SEQ ID NO: 102235 - RNA, 22 nt, Artificial Sequence
  LRRK2 RNA guide
ucuuaaaaucacagucagaggu

SEQ ID NO: 102236 - RNA, 22 nt, Artificial Sequence
  LRRK2 RNA guide
ucuuaaagacacucagggaaca

SEQ ID NO: 102237 - RNA, 22 nt, Artificial Sequence
  LRRK2 RNA guide
ucuucaucccguuuacauugcg

SEQ ID NO: 102238 - RNA, 22 nt, Artificial Sequence
  LRRK2 RNA guide
ucuucccaauacagagcauguc

SEQ ID NO: 102239 - RNA, 22 nt, Artificial Sequence
  LRRK2 RNA guide
ucuucucaucuaggacaugcuc

SEQ ID NO: 102240 - RNA, 22 nt, Artificial Sequence
  LRRK2 RNA guide
ucuugccaauaacgagacuaaa

SEQ ID NO: 102241 - RNA, 22 nt, Artificial Sequence
  LRRK2 RNA guide
ucuugguuauucccaaaauuug

SEQ ID NO: 102242 - RNA, 22 nt, Artificial Sequence
  LRRK2 RNA guide
ugaacucuacaagaguuugcua

SEQ ID NO: 102243 - RNA, 22 nt, Artificial Sequence
  LRRK2 RNA guide
ugaagagccccaguauguguuc

SEQ ID NO: 102244 - RNA, 22 nt, Artificial Sequence
  LRRK2 RNA guide
ugaauucaucuugccaauaacg

SEQ ID NO: 102245 - RNA, 22 nt, Artificial Sequence
  LRRK2 RNA guide
ugacuauuccaaguaucuuccc

SEQ ID NO: 102246 - RNA, 22 nt, Artificial Sequence
  LRRK2 RNA guide
ugaggaaccucugacugugauu

SEQ ID NO: 102247 - RNA, 22 nt, Artificial Sequence
  LRRK2 RNA guide
ugaguugaagugaaaacaaugc

SEQ ID NO: 102248 - RNA, 22 nt, Artificial Sequence
  LRRK2 RNA guide
ugauaaaaugcaacuuugucac

SEQ ID NO: 102249 - RNA, 22 nt, Artificial Sequence
  LRRK2 RNA guide
ugcaacuuugucacuagcaaac

SEQ ID NO: 102250 - RNA, 22 nt, Artificial Sequence
  LRRK2 RNA guide
ugccaauaacgagacuaaaacc

SEQ ID NO: 102251 - RNA, 22 nt, Artificial Sequence
  LRRK2 RNA guide
ugccaguaaaacgucuccuucc

SEQ ID NO: 102252 - RNA, 22 nt, Artificial Sequence
  LRRK2 RNA guide
ugcuagugacaaaguugcauuu

SEQ ID NO: 102253 - RNA, 22 nt, Artificial Sequence
  LRRK2 RNA guide
ugcucuguauugggaagauacu

SEQ ID NO: 102254 - RNA, 22 nt, Artificial Sequence
  LRRK2 RNA guide
ugcugaacucuacaagaguuug

SEQ ID NO: 102255 - RNA, 22 nt, Artificial Sequence
  LRRK2 RNA guide
uggaaggagacguuuuacuggc

SEQ ID NO: 102256 - RNA, 22 nt, Artificial Sequence
  LRRK2 RNA guide
uggaauagucaagucuaaacac

SEQ ID NO: 102257 - RNA, 22 nt, Artificial Sequence
  LRRK2 RNA guide
uggauggugguagaaggaggau

SEQ ID NO: 102258 - RNA, 22 nt, Artificial Sequence
  LRRK2 RNA guide
uggcaagaugaauucauuagug

SEQ ID NO: 102259 - RNA, 22 nt, Artificial Sequence
  LRRK2 RNA guide
uggcaauguuaauauagccgag

SEQ ID NO: 102260 - RNA, 22 nt, Artificial Sequence
  LRRK2 RNA guide
uggcuugaggaaccucugacug

SEQ ID NO: 102261 - RNA, 22 nt, Artificial Sequence
  LRRK2 RNA guide
ugggaagauacuuggaauaguc

SEQ ID NO: 102262 - RNA, 22 nt, Artificial Sequence
  LRRK2 RNA guide
ugggaauaaccaagaacucucg

SEQ ID NO: 102263 - RNA, 22 nt, Artificial Sequence
  LRRK2 RNA guide
uggggcucuucaucccguuuac

SEQ ID NO: 102264 - RNA, 22 nt, Artificial Sequence
  LRRK2 RNA guide
uggguucgguuuuagucucguu

SEQ ID NO: 102265 - RNA, 22 nt, Artificial Sequence
  LRRK2 RNA guide
ugguagaaggaggauaaaaaug

SEQ ID NO: 102266 - RNA, 22 nt, Artificial Sequence
  LRRK2 RNA guide
uggugguagaaggaggauaaaa

SEQ ID NO: 102267 - RNA, 22 nt, Artificial Sequence
  LRRK2 RNA guide
ugguuauucccaaaauuuggcu

SEQ ID NO: 102268 - RNA, 22 nt, Artificial Sequence
  LRRK2 RNA guide
uguaaacgggaugaagagcccc

SEQ ID NO: 102269 - RNA, 22 nt, Artificial Sequence
  LRRK2 RNA guide
uguauugggaagauacuuggaa

SEQ ID NO: 102270 - RNA, 22 nt, Artificial Sequence
  LRRK2 RNA guide
ugucacuagcaaacucuuguag

SEQ ID NO: 102271 - RNA, 22 nt, Artificial Sequence
  LRRK2 RNA guide
uguccuagaugagaagauuaug

SEQ ID NO: 102272 - RNA, 22 nt, Artificial Sequence
  LRRK2 RNA guide
uguguucccugagugucuuuaa

SEQ ID NO: 102273 - RNA, 22 nt, Artificial Sequence
  LRRK2 RNA guide
uguuaaaucauuacgcaaugua

SEQ ID NO: 102274 - RNA, 22 nt, Artificial Sequence
  LRRK2 RNA guide
uguuaauauagccgagaguucu

SEQ ID NO: 102275 - RNA, 22 nt, Artificial Sequence
  LRRK2 RNA guide
uguucccugagugucuuuaaga

SEQ ID NO: 102276 - RNA, 22 nt, Artificial Sequence
  LRRK2 RNA guide
uguuuagacuugacuauuccaa

SEQ ID NO: 102277 - RNA, 22 nt, Artificial Sequence
  LRRK2 RNA guide
uguuuggaaggagacguuuuac

SEQ ID NO: 102278 - RNA, 22 nt, Artificial Sequence
  LRRK2 RNA guide
uguuuucacuucaacucauucu

SEQ ID NO: 102279 - RNA, 22 nt, Artificial Sequence
  LRRK2 RNA guide
uuaaaaagugcugaacucuaca

SEQ ID NO: 102280 - RNA, 22 nt, Artificial Sequence
  LRRK2 RNA guide
uuaaaaucacagucagagguuc

SEQ ID NO: 102281 - RNA, 22 nt, Artificial Sequence
  LRRK2 RNA guide
uuaaagacacucagggaacaca

SEQ ID NO: 102282 - RNA, 22 nt, Artificial Sequence
  LRRK2 RNA guide
uuaaaucauuacgcaauguaaa

SEQ ID NO: 102283 - RNA, 22 nt, Artificial Sequence
  LRRK2 RNA guide
uuaacauugccaguaaaacguc

SEQ ID NO: 102284 - RNA, 22 nt, Artificial Sequence
  LRRK2 RNA guide
uuaauauagccgagaguucuug

SEQ ID NO: 102285 - RNA, 22 nt, Artificial Sequence
  LRRK2 RNA guide
uuacgcaauguaaacgggauga

SEQ ID NO: 102286 - RNA, 22 nt, Artificial Sequence
  LRRK2 RNA guide
uuacuggcaauguuaauauagc

SEQ ID NO: 102287 - RNA, 22 nt, Artificial Sequence
  LRRK2 RNA guide
uuacuucuuaaagacacucagg

SEQ ID NO: 102288 - RNA, 22 nt, Artificial Sequence
  LRRK2 RNA guide
uuagacuugacuauuccaagua

SEQ ID NO: 102289 - RNA, 22 nt, Artificial Sequence
  LRRK2 RNA guide
uuagucucguuauuggcaagau

SEQ ID NO: 102290 - RNA, 22 nt, Artificial Sequence
  LRRK2 RNA guide
uuaguguuuagacuugacuauu

SEQ ID NO: 102291 - RNA, 22 nt, Artificial Sequence
  LRRK2 RNA guide
uuauaaaaccaacaguauggau

SEQ ID NO: 102292 - RNA, 22 nt, Artificial Sequence
  LRRK2 RNA guide
uuauccuccuucuaccaccauc

SEQ ID NO: 102293 - RNA, 22 nt, Artificial Sequence
  LRRK2 RNA guide
uuauucccaaaauuuggcuuga

SEQ ID NO: 102294 - RNA, 22 nt, Artificial Sequence
  LRRK2 RNA guide
uucaacucauucucccuucugu

SEQ ID NO: 102295 - RNA, 22 nt, Artificial Sequence
  LRRK2 RNA guide
uucacuucaacucauucucccu

SEQ ID NO: 102296 - RNA, 22 nt, Artificial Sequence
  LRRK2 RNA guide
uucauaaucuucucaucuagga

SEQ ID NO: 102297 - RNA, 22 nt, Artificial Sequence
  LRRK2 RNA guide
uucaucccguuuacauugcgua

SEQ ID NO: 102298 - RNA, 22 nt, Artificial Sequence
  LRRK2 RNA guide
uucaucuugccaauaacgagac

SEQ ID NO: 102299 - RNA, 22 nt, Artificial Sequence
  LRRK2 RNA guide
uuccaaacagaagggagaauga

SEQ ID NO: 102300 - RNA, 22 nt, Artificial Sequence
  LRRK2 RNA guide
uuccaaguaucuucccaauaca

SEQ ID NO: 102301 - RNA, 22 nt, Artificial Sequence
  LRRK2 RNA guide
uucccaaaauuuggcuugagga

SEQ ID NO: 102302 - RNA, 22 nt, Artificial Sequence
  LRRK2 RNA guide
uucccaauacagagcauguccu

SEQ ID NO: 102303 - RNA, 22 nt, Artificial Sequence
  LRRK2 RNA guide
uucccaucuuaaaaucacaguc

SEQ ID NO: 102304 - RNA, 22 nt, Artificial Sequence
  LRRK2 RNA guide
uuccccuuuuccaaacuauuca

SEQ ID NO: 102305 - RNA, 22 nt, Artificial Sequence
  LRRK2 RNA guide
uucccugagugucuuuaagaag

SEQ ID NO: 102306 - RNA, 22 nt, Artificial Sequence
  LRRK2 RNA guide
uuccucaagccaaauuuuggga

SEQ ID NO: 102307 - RNA, 22 nt, Artificial Sequence
  LRRK2 RNA guide
uucgguuuuagucucguuauug

SEQ ID NO: 102308 - RNA, 22 nt, Artificial Sequence
  LRRK2 RNA guide
uucuaccaccauccauacuguu

SEQ ID NO: 102309 - RNA, 22 nt, Artificial Sequence
  LRRK2 RNA guide
uucuagccuuuaguuguaguau

SEQ ID NO: 102310 - RNA, 22 nt, Artificial Sequence
  LRRK2 RNA guide
uucucaucuaggacaugcucug

SEQ ID NO: 102311 - RNA, 22 nt, Artificial Sequence
  LRRK2 RNA guide
uucucccuucuguuuggaagga

SEQ ID NO: 102312 - RNA, 22 nt, Artificial Sequence
  LRRK2 RNA guide
uucuguuuggaaggagacguuu

SEQ ID NO: 102313 - RNA, 22 nt, Artificial Sequence
  LRRK2 RNA guide
uucuuaaagacacucagggaac

SEQ ID NO: 102314 - RNA, 22 nt, Artificial Sequence
  LRRK2 RNA guide
uucuugguuauucccaaaauuu

SEQ ID NO: 102315 - RNA, 22 nt, Artificial Sequence
  LRRK2 RNA guide
uugacuauuccaaguaucuucc

SEQ ID NO: 102316 - RNA, 22 nt, Artificial Sequence
  LRRK2 RNA guide
uugaggaaccucugacugugau

SEQ ID NO: 102317 - RNA, 22 nt, Artificial Sequence
  LRRK2 RNA guide
uugccaauaacgagacuaaaac

SEQ ID NO: 102318 - RNA, 22 nt, Artificial Sequence
  LRRK2 RNA guide
uugccaguaaaacgucuccuuc

SEQ ID NO: 102319 - RNA, 22 nt, Artificial Sequence
  LRRK2 RNA guide
uugcuagugacaaaguugcauu

SEQ ID NO: 102320 - RNA, 22 nt, Artificial Sequence
  LRRK2 RNA guide
uuggaaggagacguuuuacugg

SEQ ID NO: 102321 - RNA, 22 nt, Artificial Sequence
  LRRK2 RNA guide
uuggcuugaggaaccucugacu

SEQ ID NO: 102322 - RNA, 22 nt, Artificial Sequence
  LRRK2 RNA guide
uugggaagauacuuggaauagu

SEQ ID NO: 102323 - RNA, 22 nt, Artificial Sequence
  LRRK2 RNA guide
uugggaauaaccaagaacucuc

SEQ ID NO: 102324 - RNA, 22 nt, Artificial Sequence
  LRRK2 RNA guide
uugguuauucccaaaauuuggc

SEQ ID NO: 102325 - RNA, 22 nt, Artificial Sequence
  LRRK2 RNA guide
uugucacuagcaaacucuugua

SEQ ID NO: 102326 - RNA, 22 nt, Artificial Sequence
  LRRK2 RNA guide
uuguuuucacuucaacucauuc

SEQ ID NO: 102327 - RNA, 22 nt, Artificial Sequence
  LRRK2 RNA guide
uuuaaaaagugcugaacucuac

SEQ ID NO: 102328 - RNA, 22 nt, Artificial Sequence
  LRRK2 RNA guide
uuuacuggcaauguuaauauag

SEQ ID NO: 102329 - RNA, 22 nt, Artificial Sequence
  LRRK2 RNA guide
uuuagucucguuauuggcaaga

SEQ ID NO: 102330 - RNA, 22 nt, Artificial Sequence
  LRRK2 RNA guide
uuuauaaaaccaacaguaugga

SEQ ID NO: 102331 - RNA, 22 nt, Artificial Sequence
  LRRK2 RNA guide
uuuauccuccuucuaccaccau

SEQ ID NO: 102332 - RNA, 22 nt, Artificial Sequence
  LRRK2 RNA guide
uuucacuucaacucauucuccc

SEQ ID NO: 102333 - RNA, 22 nt, Artificial Sequence
  LRRK2 RNA guide
uuucuagccuuuaguuguagua

SEQ ID NO: 102334 - RNA, 22 nt, Artificial Sequence
  LRRK2 RNA guide
uuuggaaggagacguuuuacug

SEQ ID NO: 102335 - RNA, 22 nt, Artificial Sequence
  LRRK2 RNA guide
uuuggcuugaggaaccucugac

SEQ ID NO: 102336 - RNA, 22 nt, Artificial Sequence
  LRRK2 RNA guide
uuugggaauaaccaagaacucu

SEQ ID NO: 102337 - RNA, 22 nt, Artificial Sequence
  LRRK2 RNA guide
uuugucacuagcaaacucuugu

SEQ ID NO: 102338 - RNA, 22 nt, Artificial Sequence
  LRRK2 RNA guide
uuuuacuggcaauguuaauaua

SEQ ID NO: 102339 - RNA, 22 nt, Artificial Sequence
  LRRK2 RNA guide
uuuuagucucguuauuggcaag

SEQ ID NO: 102340 - RNA, 22 nt, Artificial Sequence
  LRRK2 RNA guide
uuuuauccuccuucuaccacca

SEQ ID NO: 102341 - RNA, 22 nt, Artificial Sequence
  LRRK2 RNA guide
uuuucacuucaacucauucucc

SEQ ID NO: 102342 - RNA, 22 nt, Artificial Sequence
  LRRK2 RNA guide
uuuugggaauaaccaagaacuc

SEQ ID NO: 102343 - RNA, 22 nt, Artificial Sequence
  LRRK2 RNA guide
uuuuuauccuccuucuaccacc

SEQ ID NO: 102344 - RNA, 20 nt, Artificial Sequence
  LRRK2 RNA guide
aaaaacacaugagcuucacu

SEQ ID NO: 102345 - RNA, 20 nt, Artificial Sequence
  LRRK2 RNA guide
aaaacacaugagcuucacua

SEQ ID NO: 102346 - RNA, 20 nt, Artificial Sequence
  LRRK2 RNA guide
aaaagcaggcaacaaaaaca

SEQ ID NO: 102347 - RNA, 20 nt, Artificial Sequence
  LRRK2 RNA guide
aaaauagcaaacccugucuc

SEQ ID NO: 102348 - RNA, 20 nt, Artificial Sequence
  LRRK2 RNA guide
aaacaaacacacauggccag

SEQ ID NO: 102349 - RNA, 20 nt, Artificial Sequence
  LRRK2 RNA guide
aaacacaugagcuucacuac

SEQ ID NO: 102350 - RNA, 20 nt, Artificial Sequence
  LRRK2 RNA guide
aaacccugucucuccaaaaa

SEQ ID NO: 102351 - RNA, 20 nt, Artificial Sequence
  LRRK2 RNA guide
aaaccugaaccaggcuuaua

SEQ ID NO: 102352 - RNA, 20 nt, Artificial Sequence
  LRRK2 RNA guide
aaagaaacaaacacacaugg

SEQ ID NO: 102353 - RNA, 20 nt, Artificial Sequence
  LRRK2 RNA guide
aaagaaugaaaaaauuagcc

SEQ ID NO: 102354 - RNA, 20 nt, Artificial Sequence
  LRRK2 RNA guide
aaagcaggcaacaaaaacac

SEQ ID NO: 102355 - RNA, 20 nt, Artificial Sequence
  LRRK2 RNA guide
aaauagcaaacccugucucu

SEQ ID NO: 102356 - RNA, 20 nt, Artificial Sequence
  LRRK2 RNA guide
aacaaaaacacaugagcuuc

SEQ ID NO: 102357 - RNA, 20 nt, Artificial Sequence
  LRRK2 RNA guide
aacaaacacacauggccagg

SEQ ID NO: 102358 - RNA, 20 nt, Artificial Sequence
  LRRK2 RNA guide
aacacaugagcuucacuaca

SEQ ID NO: 102359 - RNA, 20 nt, Artificial Sequence
  LRRK2 RNA guide
aaccaggcuuauaaaaacua

SEQ ID NO: 102360 - RNA, 20 nt, Artificial Sequence
  LRRK2 RNA guide
aacccagaaguuuagaccag

SEQ ID NO: 102361 - RNA, 20 nt, Artificial Sequence
  LRRK2 RNA guide
aacccugucucuccaaaaaa

SEQ ID NO: 102362 - RNA, 20 nt, Artificial Sequence
  LRRK2 RNA guide
aaccugaaccaggcuuauaa

SEQ ID NO: 102363 - RNA, 20 nt, Artificial Sequence
  LRRK2 RNA guide
aacuccugggcucaagugag

SEQ ID NO: 102364 - RNA, 20 nt, Artificial Sequence
  LRRK2 RNA guide
aagaaacaaacacacauggc

SEQ ID NO: 102365 - RNA, 20 nt, Artificial Sequence
  LRRK2 RNA guide
aagaaugaaaaaauuagccu

SEQ ID NO: 102366 - RNA, 20 nt, Artificial Sequence
  LRRK2 RNA guide
aagacccugucucuaaaagc

SEQ ID NO: 102367 - RNA, 20 nt, Artificial Sequence
  LRRK2 RNA guide
aagcaggcaacaaaaacaca

SEQ ID NO: 102368 - RNA, 20 nt, Artificial Sequence
  LRRK2 RNA guide
aagccugguucagguuugua

SEQ ID NO: 102369 - RNA, 20 nt, Artificial Sequence
  LRRK2 RNA guide
aagcucauguguuuuuguug

SEQ ID NO: 102370 - RNA, 20 nt, Artificial Sequence
  LRRK2 RNA guide
aagugagcaauccuccugcc

SEQ ID NO: 102371 - RNA, 20 nt, Artificial Sequence
  LRRK2 RNA guide
aaguuuagaccagccuaggc

SEQ ID NO: 102372 - RNA, 20 nt, Artificial Sequence
  LRRK2 RNA guide
aauagcaaacccugucucuc

SEQ ID NO: 102373 - RNA, 20 nt, Artificial Sequence
  LRRK2 RNA guide
aauucccuguagugaagcuc

SEQ ID NO: 102374 - RNA, 20 nt, Artificial Sequence
  LRRK2 RNA guide
acaaaaacacaugagcuuca

SEQ ID NO: 102375 - RNA, 20 nt, Artificial Sequence
  LRRK2 RNA guide
acaaacacacauggccaggc

SEQ ID NO: 102376 - RNA, 20 nt, Artificial Sequence
  LRRK2 RNA guide
acaaaccugaaccaggcuua

SEQ ID NO: 102377 - RNA, 20 nt, Artificial Sequence
  LRRK2 RNA guide
acacacauggccaggcacgg

SEQ ID NO: 102378 - RNA, 20 nt, Artificial Sequence
  LRRK2 RNA guide
acacaugagcuucacuacag

SEQ ID NO: 102379 - RNA, 20 nt, Artificial Sequence
  LRRK2 RNA guide
acaccaggcuaauuuuuuca

SEQ ID NO: 102380 - RNA, 20 nt, Artificial Sequence
  LRRK2 RNA guide
acagggaauuaaauacaaug

SEQ ID NO: 102381 - RNA, 20 nt, Artificial Sequence
  LRRK2 RNA guide
acaggguuugcuauuuugcc

SEQ ID NO: 102382 - RNA, 20 nt, Artificial Sequence
  LRRK2 RNA guide
acaugagcuucacuacaggg

SEQ ID NO: 102383 - RNA, 20 nt, Artificial Sequence
  LRRK2 RNA guide
acauucccuguuaguuuuua

SEQ ID NO: 102384 - RNA, 20 nt, Artificial Sequence
  LRRK2 RNA guide
accagccuaggcaaaauagc

SEQ ID NO: 102385 - RNA, 20 nt, Artificial Sequence
  LRRK2 RNA guide
accaggcuuauaaaaacuaa

SEQ ID NO: 102386 - RNA, 20 nt, Artificial Sequence
  LRRK2 RNA guide
acccagaaguuuagaccagc

SEQ ID NO: 102387 - RNA, 20 nt, Artificial Sequence
  LRRK2 RNA guide
acccugucucuaaaagcagg

SEQ ID NO: 102388 - RNA, 20 nt, Artificial Sequence
  LRRK2 RNA guide
acccugucucuccaaaaaag

SEQ ID NO: 102389 - RNA, 20 nt, Artificial Sequence
  LRRK2 RNA guide
accgugccuggccaugugug

SEQ ID NO: 102390 - RNA, 20 nt, Artificial Sequence
  LRRK2 RNA guide
accugaaccaggcuuauaaa

SEQ ID NO: 102391 - RNA, 20 nt, Artificial Sequence
  LRRK2 RNA guide
accuguaucccuagcaacuc

SEQ ID NO: 102392 - RNA, 20 nt, Artificial Sequence
  LRRK2 RNA guide
acuacagggaauuaaauaca

SEQ ID NO: 102393 - RNA, 20 nt, Artificial Sequence
  LRRK2 RNA guide
acuccugggcucaagugagc

SEQ ID NO: 102394 - RNA, 20 nt, Artificial Sequence
  LRRK2 RNA guide
acucucauuguauuuaauuc

SEQ ID NO: 102395 - RNA, 20 nt, Artificial Sequence
  LRRK2 RNA guide
acuugaacccagaaguuuag

SEQ ID NO: 102396 - RNA, 20 nt, Artificial Sequence
  LRRK2 RNA guide
agaaacaaacacacauggcc

SEQ ID NO: 102397 - RNA, 20 nt, Artificial Sequence
  LRRK2 RNA guide
agaaagaaacaaacacacau

SEQ ID NO: 102398 - RNA, 20 nt, Artificial Sequence
  LRRK2 RNA guide
agaaguuuagaccagccuag

SEQ ID NO: 102399 - RNA, 20 nt, Artificial Sequence
  LRRK2 RNA guide
agaaugaaaaaauuagccug

SEQ ID NO: 102400 - RNA, 20 nt, Artificial Sequence
  LRRK2 RNA guide
agacaggguuugcuauuuug

SEQ ID NO: 102401 - RNA, 20 nt, Artificial Sequence
  LRRK2 RNA guide
agaccagccuaggcaaaaua

SEQ ID NO: 102402 - RNA, 20 nt, Artificial Sequence
  LRRK2 RNA guide
agacccugucucuaaaagca

SEQ ID NO: 102403 - RNA, 20 nt, Artificial Sequence
  LRRK2 RNA guide
agagacaggguuugcuauuu

SEQ ID NO: 102404 - RNA, 20 nt, Artificial Sequence
  LRRK2 RNA guide
agcaaacccugucucuccaa

SEQ ID NO: 102405 - RNA, 20 nt, Artificial Sequence
  LRRK2 RNA guide
agcaggcaacaaaaacacau

SEQ ID NO: 102406 - RNA, 20 nt, Artificial Sequence
  LRRK2 RNA guide
agccaccgugccuggccaug

SEQ ID NO: 102407 - RNA, 20 nt, Artificial Sequence
  LRRK2 RNA guide
agccuaggcaaaauagcaaa

SEQ ID NO: 102408 - RNA, 20 nt, Artificial Sequence
  LRRK2 RNA guide
agccuccugaguugcuaggg

SEQ ID NO: 102409 - RNA, 20 nt, Artificial Sequence
  LRRK2 RNA guide
agccugguucagguuuguag

SEQ ID NO: 102410 - RNA, 20 nt, Artificial Sequence
  LRRK2 RNA guide
agcucauguguuuuuguugc

SEQ ID NO: 102411 - RNA, 20 nt, Artificial Sequence
  LRRK2 RNA guide
agcuucacuacagggaauua

SEQ ID NO: 102412 - RNA, 20 nt, Artificial Sequence
  LRRK2 RNA guide
aggaggauugcucacuugag

SEQ ID NO: 102413 - RNA, 20 nt, Artificial Sequence
  LRRK2 RNA guide
aggaucacuugaacccagaa

SEQ ID NO: 102414 - RNA, 20 nt, Artificial Sequence
  LRRK2 RNA guide
aggauugcucacuugagccc

SEQ ID NO: 102415 - RNA, 20 nt, Artificial Sequence
  LRRK2 RNA guide
aggcaaaauagcaaacccug

SEQ ID NO: 102416 - RNA, 20 nt, Artificial Sequence
  LRRK2 RNA guide
aggcaacaaaaacacaugag

SEQ ID NO: 102417 - RNA, 20 nt, Artificial Sequence
  LRRK2 RNA guide
aggcaggaggauugcucacu

SEQ ID NO: 102418 - RNA, 20 nt, Artificial Sequence
  LRRK2 RNA guide
aggcuggucuaaacuucugg

SEQ ID NO: 102419 - RNA, 20 nt, Artificial Sequence
  LRRK2 RNA guide
aggcuuauaaaaacuaacag

SEQ ID NO: 102420 - RNA, 20 nt, Artificial Sequence
  LRRK2 RNA guide
agggauacagguacaugcca

SEQ ID NO: 102421 - RNA, 20 nt, Artificial Sequence
  LRRK2 RNA guide
aggguuugcuauuuugccua

SEQ ID NO: 102422 - RNA, 20 nt, Artificial Sequence
  LRRK2 RNA guide
agguuuguagaaagaaacaa

SEQ ID NO: 102423 - RNA, 20 nt, Artificial Sequence
  LRRK2 RNA guide
agugaagcucauguguuuuu

SEQ ID NO: 102424 - RNA, 20 nt, Artificial Sequence
  LRRK2 RNA guide
agugagcaauccuccugccu

SEQ ID NO: 102425 - RNA, 20 nt, Artificial Sequence
  LRRK2 RNA guide
aguugcuagggauacaggua

SEQ ID NO: 102426 - RNA, 20 nt, Artificial Sequence
  LRRK2 RNA guide
aguuuagaccagccuaggca

SEQ ID NO: 102427 - RNA, 20 nt, Artificial Sequence
  LRRK2 RNA guide
aguuuuuauaagccugguuc

SEQ ID NO: 102428 - RNA, 20 nt, Artificial Sequence
  LRRK2 RNA guide
auaagccugguucagguuug

SEQ ID NO: 102429 - RNA, 20 nt, Artificial Sequence
  LRRK2 RNA guide
auacagguacaugccaccac

SEQ ID NO: 102430 - RNA, 20 nt, Artificial Sequence
  LRRK2 RNA guide
auagcaaacccugucucucc

SEQ ID NO: 102431 - RNA, 20 nt, Artificial Sequence
  LRRK2 RNA guide
aucacuugaacccagaaguu

SEQ ID NO: 102432 - RNA, 20 nt, Artificial Sequence
  LRRK2 RNA guide
aucccuagcaacucaggagg

SEQ ID NO: 102433 - RNA, 20 nt, Artificial Sequence
  LRRK2 RNA guide
augagcuucacuacagggaa

SEQ ID NO: 102434 - RNA, 20 nt, Artificial Sequence
  LRRK2 RNA guide
auggugcaaucauagcucac

SEQ ID NO: 102435 - RNA, 20 nt, Artificial Sequence
  LRRK2 RNA guide
auguaccuguaucccuagca

SEQ ID NO: 102436 - RNA, 20 nt, Artificial Sequence
  LRRK2 RNA guide
auguguuuuuguugccugcu

SEQ ID NO: 102437 - RNA, 20 nt, Artificial Sequence
  LRRK2 RNA guide
auucccuguagugaagcuca

SEQ ID NO: 102438 - RNA, 20 nt, Artificial Sequence
  LRRK2 RNA guide
auucccuguuaguuuuuaua

SEQ ID NO: 102439 - RNA, 20 nt, Artificial Sequence
  LRRK2 RNA guide
auucuuuuuuggagagacag

SEQ ID NO: 102440 - RNA, 20 nt, Artificial Sequence
  LRRK2 RNA guide
auugcucacuugagcccagg

SEQ ID NO: 102441 - RNA, 20 nt, Artificial Sequence
  LRRK2 RNA guide
auuuaauucccuguagugaa

SEQ ID NO: 102442 - RNA, 20 nt, Artificial Sequence
  LRRK2 RNA guide
auuuugccuaggcuggucua

SEQ ID NO: 102443 - RNA, 20 nt, Artificial Sequence
  LRRK2 RNA guide
caaaaacacaugagcuucac

SEQ ID NO: 102444 - RNA, 20 nt, Artificial Sequence
  LRRK2 RNA guide
caaaauagcaaacccugucu

SEQ ID NO: 102445 - RNA, 20 nt, Artificial Sequence
  LRRK2 RNA guide
caaacacacauggccaggca

SEQ ID NO: 102446 - RNA, 20 nt, Artificial Sequence
  LRRK2 RNA guide
caaacccugucucuccaaaa

SEQ ID NO: 102447 - RNA, 20 nt, Artificial Sequence
  LRRK2 RNA guide
caaaccugaaccaggcuuau

SEQ ID NO: 102448 - RNA, 20 nt, Artificial Sequence
  LRRK2 RNA guide
caacaaaaacacaugagcuu

SEQ ID NO: 102449 - RNA, 20 nt, Artificial Sequence
  LRRK2 RNA guide
caagacccugucucuaaaag

SEQ ID NO: 102450 - RNA, 20 nt, Artificial Sequence
  LRRK2 RNA guide
caagugagcaauccuccugc

SEQ ID NO: 102451 - RNA, 20 nt, Artificial Sequence
  LRRK2 RNA guide
cacacauggccaggcacggu

SEQ ID NO: 102452 - RNA, 20 nt, Artificial Sequence
  LRRK2 RNA guide
cacaccaggcuaauuuuuuc

SEQ ID NO: 102453 - RNA, 20 nt, Artificial Sequence
  LRRK2 RNA guide
cacaugagcuucacuacagg

SEQ ID NO: 102454 - RNA, 20 nt, Artificial Sequence
  LRRK2 RNA guide
caccaggcuaauuuuuucau

SEQ ID NO: 102455 - RNA, 20 nt, Artificial Sequence
  LRRK2 RNA guide
caccgugccuggccaugugu

SEQ ID NO: 102456 - RNA, 20 nt, Artificial Sequence
  LRRK2 RNA guide
cacuacagggaauuaaauac

SEQ ID NO: 102457 - RNA, 20 nt, Artificial Sequence
  LRRK2 RNA guide
cacuugaacccagaaguuua

SEQ ID NO: 102458 - RNA, 20 nt, Artificial Sequence
  LRRK2 RNA guide
cagaaguuuagaccagccua

SEQ ID NO: 102459 - RNA, 20 nt, Artificial Sequence
  LRRK2 RNA guide
cagccuaggcaaaauagcaa

SEQ ID NO: 102460 - RNA, 20 nt, Artificial Sequence
  LRRK2 RNA guide
cagccuccugaguugcuagg

SEQ ID NO: 102461 - RNA, 20 nt, Artificial Sequence
  LRRK2 RNA guide
caggaggauugcucacuuga

SEQ ID NO: 102462 - RNA, 20 nt, Artificial Sequence
  LRRK2 RNA guide
caggcaacaaaaacacauga

SEQ ID NO: 102463 - RNA, 20 nt, Artificial Sequence
  LRRK2 RNA guide
caggcuuauaaaaacuaaca

SEQ ID NO: 102464 - RNA, 20 nt, Artificial Sequence
  LRRK2 RNA guide
cagggaauuaaauacaauga

SEQ ID NO: 102465 - RNA, 20 nt, Artificial Sequence
  LRRK2 RNA guide
caggguuugcuauuuugccu

SEQ ID NO: 102466 - RNA, 20 nt, Artificial Sequence
  LRRK2 RNA guide
cagguuuguagaaagaaaca

SEQ ID NO: 102467 - RNA, 20 nt, Artificial Sequence
  LRRK2 RNA guide
cauacucaaaaguuugcuua

SEQ ID NO: 102468 - RNA, 20 nt, Artificial Sequence
  LRRK2 RNA guide
caugagcuucacuacaggga

SEQ ID NO: 102469 - RNA, 20 nt, Artificial Sequence
  LRRK2 RNA guide
cauguaccuguaucccuagc

SEQ ID NO: 102470 - RNA, 20 nt, Artificial Sequence
  LRRK2 RNA guide
cauguguuuuuguugccugc

SEQ ID NO: 102471 - RNA, 20 nt, Artificial Sequence
  LRRK2 RNA guide
cauucccuguuaguuuuuau

SEQ ID NO: 102472 - RNA, 20 nt, Artificial Sequence
  LRRK2 RNA guide
cauucuuuuuuggagagaca

SEQ ID NO: 102473 - RNA, 20 nt, Artificial Sequence
  LRRK2 RNA guide
cauuguauuuaauucccugu

SEQ ID NO: 102474 - RNA, 20 nt, Artificial Sequence
  LRRK2 RNA guide
ccacaccaggcuaauuuuuu

SEQ ID NO: 102475 - RNA, 20 nt, Artificial Sequence
  LRRK2 RNA guide
ccagaaguuuagaccagccu

SEQ ID NO: 102476 - RNA, 20 nt, Artificial Sequence
  LRRK2 RNA guide
ccagccuaggcaaaauagca

SEQ ID NO: 102477 - RNA, 20 nt, Artificial Sequence
  LRRK2 RNA guide
ccaggcuuauaaaaacuaac

SEQ ID NO: 102478 - RNA, 20 nt, Artificial Sequence
  LRRK2 RNA guide
ccauguguguuuguuucuuu

SEQ ID NO: 102479 - RNA, 20 nt, Artificial Sequence
  LRRK2 RNA guide
cccagaaguuuagaccagcc

SEQ ID NO: 102480 - RNA, 20 nt, Artificial Sequence
  LRRK2 RNA guide
cccuguagugaagcucaugu

SEQ ID NO: 102481 - RNA, 20 nt, Artificial Sequence
  LRRK2 RNA guide
cccugucucuaaaagcaggc

SEQ ID NO: 102482 - RNA, 20 nt, Artificial Sequence
  LRRK2 RNA guide
cccugucucuccaaaaaaga

SEQ ID NO: 102483 - RNA, 20 nt, Artificial Sequence
  LRRK2 RNA guide
cccuguuaguuuuuauaagc

SEQ ID NO: 102484 - RNA, 20 nt, Artificial Sequence
  LRRK2 RNA guide
ccgugccuggccaugugugu

SEQ ID NO: 102485 - RNA, 20 nt, Artificial Sequence
  LRRK2 RNA guide
ccuaggcaaaauagcaaacc

SEQ ID NO: 102486 - RNA, 20 nt, Artificial Sequence
  LRRK2 RNA guide
ccuaggcuggucuaaacuuc

SEQ ID NO: 102487 - RNA, 20 nt, Artificial Sequence
  LRRK2 RNA guide
ccucagccuccugaguugcu

SEQ ID NO: 102488 - RNA, 20 nt, Artificial Sequence
  LRRK2 RNA guide
ccuccugaguugcuagggau

SEQ ID NO: 102489 - RNA, 20 nt, Artificial Sequence
  LRRK2 RNA guide
ccugaaccaggcuuauaaaa

SEQ ID NO: 102490 - RNA, 20 nt, Artificial Sequence
  LRRK2 RNA guide
ccugaguugcuagggauaca

SEQ ID NO: 102491 - RNA, 20 nt, Artificial Sequence
  LRRK2 RNA guide
ccugcuuuuagagacagggu

SEQ ID NO: 102492 - RNA, 20 nt, Artificial Sequence
  LRRK2 RNA guide
ccuggccauguguguuuguu

SEQ ID NO: 102493 - RNA, 20 nt, Artificial Sequence
  LRRK2 RNA guide
ccugggcucaagugagcaau

SEQ ID NO: 102494 - RNA, 20 nt, Artificial Sequence
  LRRK2 RNA guide
ccugguucagguuuguagaa

SEQ ID NO: 102495 - RNA, 20 nt, Artificial Sequence
  LRRK2 RNA guide
ccuguagugaagcucaugug

SEQ ID NO: 102496 - RNA, 20 nt, Artificial Sequence
  LRRK2 RNA guide
ccuguaucccuagcaacuca

SEQ ID NO: 102497 - RNA, 20 nt, Artificial Sequence
  LRRK2 RNA guide
ccugucucuaaaagcaggca

SEQ ID NO: 102498 - RNA, 20 nt, Artificial Sequence
  LRRK2 RNA guide
ccugucucuccaaaaaagaa

SEQ ID NO: 102499 - RNA, 20 nt, Artificial Sequence
  LRRK2 RNA guide
ccuguuaguuuuuauaagcc

SEQ ID NO: 102500 - RNA, 20 nt, Artificial Sequence
  LRRK2 RNA guide
cgugccuggccauguguguu

SEQ ID NO: 102501 - RNA, 20 nt, Artificial Sequence
  LRRK2 RNA guide
cuaaaagcaggcaacaaaaa

SEQ ID NO: 102502 - RNA, 20 nt, Artificial Sequence
  LRRK2 RNA guide
cuaaacuucuggguucaagu

SEQ ID NO: 102503 - RNA, 20 nt, Artificial Sequence
  LRRK2 RNA guide
cuacaaaccugaaccaggcu

SEQ ID NO: 102504 - RNA, 20 nt, Artificial Sequence
  LRRK2 RNA guide
cuacagggaauuaaauacaa

SEQ ID NO: 102505 - RNA, 20 nt, Artificial Sequence
  LRRK2 RNA guide
cuaggcaaaauagcaaaccc

SEQ ID NO: 102506 - RNA, 20 nt, Artificial Sequence
  LRRK2 RNA guide
cuaggcuggucuaaacuucu

SEQ ID NO: 102507 - RNA, 20 nt, Artificial Sequence
  LRRK2 RNA guide
cuauuuugccuaggcugguc

SEQ ID NO: 102508 - RNA, 20 nt, Artificial Sequence
  LRRK2 RNA guide
cucaagugagcaauccuccu

SEQ ID NO: 102509 - RNA, 20 nt, Artificial Sequence
  LRRK2 RNA guide
cucagccuccugaguugcua

SEQ ID NO: 102510 - RNA, 20 nt, Artificial Sequence
  LRRK2 RNA guide
cucauguguuuuuguugccu

SEQ ID NO: 102511 - RNA, 20 nt, Artificial Sequence
  LRRK2 RNA guide
cucauuguauuuaauucccu

SEQ ID NO: 102512 - RNA, 20 nt, Artificial Sequence
  LRRK2 RNA guide
cuccugaguugcuagggaua

SEQ ID NO: 102513 - RNA, 20 nt, Artificial Sequence
  LRRK2 RNA guide
cuccugggcucaagugagca

SEQ ID NO: 102514 - RNA, 20 nt, Artificial Sequence
  LRRK2 RNA guide
cucuaaaagcaggcaacaaa

SEQ ID NO: 102515 - RNA, 20 nt, Artificial Sequence
  LRRK2 RNA guide
cucucauuguauuuaauucc

SEQ ID NO: 102516 - RNA, 20 nt, Artificial Sequence
  LRRK2 RNA guide
cugaaccaggcuuauaaaaa

SEQ ID NO: 102517 - RNA, 20 nt, Artificial Sequence
  LRRK2 RNA guide
cugaguugcuagggauacag

SEQ ID NO: 102518 - RNA, 20 nt, Artificial Sequence
  LRRK2 RNA guide
cugcuuuuagagacaggguc

SEQ ID NO: 102519 - RNA, 20 nt, Artificial Sequence
  LRRK2 RNA guide
cuggaguuaaaaacagaaau

SEQ ID NO: 102520 - RNA, 20 nt, Artificial Sequence
  LRRK2 RNA guide
cuggccauguguguuuguuu

SEQ ID NO: 102521 - RNA, 20 nt, Artificial Sequence
  LRRK2 RNA guide
cugggcucaagugagcaauc

SEQ ID NO: 102522 - RNA, 20 nt, Artificial Sequence
  LRRK2 RNA guide
cuggucuaaacuucuggguu

SEQ ID NO: 102523 - RNA, 20 nt, Artificial Sequence
  LRRK2 RNA guide
cuggugugguggcauguacc

SEQ ID NO: 102524 - RNA, 20 nt, Artificial Sequence
  LRRK2 RNA guide
cugguucagguuuguagaaa

SEQ ID NO: 102525 - RNA, 20 nt, Artificial Sequence
  LRRK2 RNA guide
cuguagugaagcucaugugu

SEQ ID NO: 102526 - RNA, 20 nt, Artificial Sequence
  LRRK2 RNA guide
cuguaucccuagcaacucag

SEQ ID NO: 102527 - RNA, 20 nt, Artificial Sequence
  LRRK2 RNA guide
cugucucuaaaagcaggcaa

SEQ ID NO: 102528 - RNA, 20 nt, Artificial Sequence
  LRRK2 RNA guide
cugucucuccaaaaaagaau

SEQ ID NO: 102529 - RNA, 20 nt, Artificial Sequence
  LRRK2 RNA guide
cuguuaguuuuuauaagccu

SEQ ID NO: 102530 - RNA, 20 nt, Artificial Sequence
  LRRK2 RNA guide
cuucacuacagggaauuaaa

SEQ ID NO: 102531 - RNA, 20 nt, Artificial Sequence
  LRRK2 RNA guide
cuugaacccagaaguuuaga

SEQ ID NO: 102532 - RNA, 20 nt, Artificial Sequence
  LRRK2 RNA guide
cuuucuacaaaccugaacca

SEQ ID NO: 102533 - RNA, 20 nt, Artificial Sequence
  LRRK2 RNA guide
cuuuuuuggagagacagggu

SEQ ID NO: 102534 - RNA, 20 nt, Artificial Sequence
  LRRK2 RNA guide
gaaacaaacacacauggcca

SEQ ID NO: 102535 - RNA, 20 nt, Artificial Sequence
  LRRK2 RNA guide
gaaagaaacaaacacacaug

SEQ ID NO: 102536 - RNA, 20 nt, Artificial Sequence
  LRRK2 RNA guide
gaaccaggcuuauaaaaacu

SEQ ID NO: 102537 - RNA, 20 nt, Artificial Sequence
  LRRK2 RNA guide
gaacccagaaguuuagacca

SEQ ID NO: 102538 - RNA, 20 nt, Artificial Sequence
  LRRK2 RNA guide
gaagcucauguguuuuuguu

SEQ ID NO: 102539 - RNA, 20 nt, Artificial Sequence
  LRRK2 RNA guide
gaaguuuagaccagccuagg

SEQ ID NO: 102540 - RNA, 20 nt, Artificial Sequence
  LRRK2 RNA guide
gaaugaaaaaauuagccugg

SEQ ID NO: 102541 - RNA, 20 nt, Artificial Sequence
  LRRK2 RNA guide
gacaggguuugcuauuuugc

SEQ ID NO: 102542 - RNA, 20 nt, Artificial Sequence
  LRRK2 RNA guide
gaccagccuaggcaaaauag

SEQ ID NO: 102543 - RNA, 20 nt, Artificial Sequence
  LRRK2 RNA guide
gacccugucucuaaaagcag

SEQ ID NO: 102544 - RNA, 20 nt, Artificial Sequence
  LRRK2 RNA guide
gagacaggguuugcuauuuu

SEQ ID NO: 102545 - RNA, 20 nt, Artificial Sequence
  LRRK2 RNA guide
gagagacaggguuugcuauu

SEQ ID NO: 102546 - RNA, 20 nt, Artificial Sequence
  LRRK2 RNA guide
gagaguaauaaaaaauaggu

SEQ ID NO: 102547 - RNA, 20 nt, Artificial Sequence
  LRRK2 RNA guide
gagcuucacuacagggaauu

SEQ ID NO: 102548 - RNA, 20 nt, Artificial Sequence
  LRRK2 RNA guide
gaggauugcucacuugagcc

SEQ ID NO: 102549 - RNA, 20 nt, Artificial Sequence
  LRRK2 RNA guide
gaggcaggaggauugcucac

SEQ ID NO: 102550 - RNA, 20 nt, Artificial Sequence
  LRRK2 RNA guide
gaguugcuagggauacaggu

SEQ ID NO: 102551 - RNA, 20 nt, Artificial Sequence
  LRRK2 RNA guide
gauacagguacaugccacca

SEQ ID NO: 102552 - RNA, 20 nt, Artificial Sequence
  LRRK2 RNA guide
gaucacuugaacccagaagu

SEQ ID NO: 102553 - RNA, 20 nt, Artificial Sequence
  LRRK2 RNA guide
gauugcucacuugagcccag

SEQ ID NO: 102554 - RNA, 20 nt, Artificial Sequence
  LRRK2 RNA guide
gcaaaauagcaaacccuguc

SEQ ID NO: 102555 - RNA, 20 nt, Artificial Sequence
  LRRK2 RNA guide
gcaaacccugucucuccaaa

SEQ ID NO: 102556 - RNA, 20 nt, Artificial Sequence
  LRRK2 RNA guide
gcaaauaagcaaacuuuuga

SEQ ID NO: 102557 - RNA, 20 nt, Artificial Sequence
  LRRK2 RNA guide
gcaacaaaaacacaugagcu

SEQ ID NO: 102558 - RNA, 20 nt, Artificial Sequence
  LRRK2 RNA guide
gcaggaggauugcucacuug

SEQ ID NO: 102559 - RNA, 20 nt, Artificial Sequence
  LRRK2 RNA guide
gcaggcaacaaaaacacaug

SEQ ID NO: 102560 - RNA, 20 nt, Artificial Sequence
  LRRK2 RNA guide
gcauguaccuguaucccuag

SEQ ID NO: 102561 - RNA, 20 nt, Artificial Sequence
  LRRK2 RNA guide
gccauguguguuuguuucuu

SEQ ID NO: 102562 - RNA, 20 nt, Artificial Sequence
  LRRK2 RNA guide
gccuaggcaaaauagcaaac

SEQ ID NO: 102563 - RNA, 20 nt, Artificial Sequence
  LRRK2 RNA guide
gccuaggcuggucuaaacuu

SEQ ID NO: 102564 - RNA, 20 nt, Artificial Sequence
  LRRK2 RNA guide
gccuccugaguugcuaggga

SEQ ID NO: 102565 - RNA, 20 nt, Artificial Sequence
  LRRK2 RNA guide
gccugcuuuuagagacaggg

SEQ ID NO: 102566 - RNA, 20 nt, Artificial Sequence
  LRRK2 RNA guide
gccuggccauguguguuugu

SEQ ID NO: 102567 - RNA, 20 nt, Artificial Sequence
  LRRK2 RNA guide
gccugguucagguuuguaga

SEQ ID NO: 102568 - RNA, 20 nt, Artificial Sequence
  LRRK2 RNA guide
gcuauuuugccuaggcuggu

SEQ ID NO: 102569 - RNA, 20 nt, Artificial Sequence
  LRRK2 RNA guide
gcucaagugagcaauccucc

SEQ ID NO: 102570 - RNA, 20 nt, Artificial Sequence
  LRRK2 RNA guide
gcucaccuauuuuuuauuac

SEQ ID NO: 102571 - RNA, 20 nt, Artificial Sequence
  LRRK2 RNA guide
gcucauguguuuuuguugcc

SEQ ID NO: 102572 - RNA, 20 nt, Artificial Sequence
  LRRK2 RNA guide
gcugaggcaggaggauugcu

SEQ ID NO: 102573 - RNA, 20 nt, Artificial Sequence
  LRRK2 RNA guide
gcuggucuaaacuucugggu

SEQ ID NO: 102574 - RNA, 20 nt, Artificial Sequence
  LRRK2 RNA guide
gcuuauaaaaacuaacaggg

SEQ ID NO: 102575 - RNA, 20 nt, Artificial Sequence
  LRRK2 RNA guide
gcuucacuacagggaauuaa

SEQ ID NO: 102576 - RNA, 20 nt, Artificial Sequence
  LRRK2 RNA guide
ggagagacaggguuugcuau

SEQ ID NO: 102577 - RNA, 20 nt, Artificial Sequence
  LRRK2 RNA guide
ggaggauugcucacuugagc

SEQ ID NO: 102578 - RNA, 20 nt, Artificial Sequence
  LRRK2 RNA guide
ggauacagguacaugccacc

SEQ ID NO: 102579 - RNA, 20 nt, Artificial Sequence
  LRRK2 RNA guide
ggaucacuugaacccagaag

SEQ ID NO: 102580 - RNA, 20 nt, Artificial Sequence
  LRRK2 RNA guide
ggauugcucacuugagccca

SEQ ID NO: 102581 - RNA, 20 nt, Artificial Sequence
  LRRK2 RNA guide
ggcaaaauagcaaacccugu

SEQ ID NO: 102582 - RNA, 20 nt, Artificial Sequence
  LRRK2 RNA guide
ggcaacaaaaacacaugagc

SEQ ID NO: 102583 - RNA, 20 nt, Artificial Sequence
  LRRK2 RNA guide
ggcaggaggauugcucacuu

SEQ ID NO: 102584 - RNA, 20 nt, Artificial Sequence
  LRRK2 RNA guide
ggcauguaccuguaucccua

SEQ ID NO: 102585 - RNA, 20 nt, Artificial Sequence
  LRRK2 RNA guide
ggccauguguguuuguuucu

SEQ ID NO: 102586 - RNA, 20 nt, Artificial Sequence
  LRRK2 RNA guide
ggcucaagugagcaauccuc

SEQ ID NO: 102587 - RNA, 20 nt, Artificial Sequence
  LRRK2 RNA guide
ggcuggucuaaacuucuggg

SEQ ID NO: 102588 - RNA, 20 nt, Artificial Sequence
  LRRK2 RNA guide
ggcuuauaaaaacuaacagg

SEQ ID NO: 102589 - RNA, 20 nt, Artificial Sequence
  LRRK2 RNA guide
gggauacagguacaugccac

SEQ ID NO: 102590 - RNA, 20 nt, Artificial Sequence
  LRRK2 RNA guide
gggcucaagugagcaauccu

SEQ ID NO: 102591 - RNA, 20 nt, Artificial Sequence
  LRRK2 RNA guide
ggguuugcuauuuugccuag

SEQ ID NO: 102592 - RNA, 20 nt, Artificial Sequence
  LRRK2 RNA guide
ggucuaaacuucuggguuca

SEQ ID NO: 102593 - RNA, 20 nt, Artificial Sequence
  LRRK2 RNA guide
ggugugguggcauguaccug

SEQ ID NO: 102594 - RNA, 20 nt, Artificial Sequence
  LRRK2 RNA guide
gguucagguuuguagaaaga

SEQ ID NO: 102595 - RNA, 20 nt, Artificial Sequence
  LRRK2 RNA guide
gguuugcuauuuugccuagg

SEQ ID NO: 102596 - RNA, 20 nt, Artificial Sequence
  LRRK2 RNA guide
gguuuguagaaagaaacaaa

SEQ ID NO: 102597 - RNA, 20 nt, Artificial Sequence
  LRRK2 RNA guide
guaccuguaucccuagcaac

SEQ ID NO: 102598 - RNA, 20 nt, Artificial Sequence
  LRRK2 RNA guide
guagaaagaaacaaacacac

SEQ ID NO: 102599 - RNA, 20 nt, Artificial Sequence
  LRRK2 RNA guide
guagugaagcucauguguuu

SEQ ID NO: 102600 - RNA, 20 nt, Artificial Sequence
  LRRK2 RNA guide
guaucccuagcaacucagga

SEQ ID NO: 102601 - RNA, 20 nt, Artificial Sequence
  LRRK2 RNA guide
guauuuaauucccuguagug

SEQ ID NO: 102602 - RNA, 20 nt, Artificial Sequence
  LRRK2 RNA guide
gucuaaacuucuggguucaa

SEQ ID NO: 102603 - RNA, 20 nt, Artificial Sequence
  LRRK2 RNA guide
gucucuaaaagcaggcaaca

SEQ ID NO: 102604 - RNA, 20 nt, Artificial Sequence
  LRRK2 RNA guide
gugaagcucauguguuuuug

SEQ ID NO: 102605 - RNA, 20 nt, Artificial Sequence
  LRRK2 RNA guide
gugagcaauccuccugccuc

SEQ ID NO: 102606 - RNA, 20 nt, Artificial Sequence
  LRRK2 RNA guide
gugccuggccauguguguuu

SEQ ID NO: 102607 - RNA, 20 nt, Artificial Sequence
  LRRK2 RNA guide
guggcauguaccuguauccc

SEQ ID NO: 102608 - RNA, 20 nt, Artificial Sequence
  LRRK2 RNA guide
gugguggcauguaccuguau

SEQ ID NO: 102609 - RNA, 20 nt, Artificial Sequence
  LRRK2 RNA guide
gugugguggcauguaccugu

SEQ ID NO: 102610 - RNA, 20 nt, Artificial Sequence
  LRRK2 RNA guide
guguguuuguuucuuucuac

SEQ ID NO: 102611 - RNA, 20 nt, Artificial Sequence
  LRRK2 RNA guide
guguuuguuucuuucuacaa

SEQ ID NO: 102612 - RNA, 20 nt, Artificial Sequence
  LRRK2 RNA guide
guguuuuuguugccugcuuu

SEQ ID NO: 102613 - RNA, 20 nt, Artificial Sequence
  LRRK2 RNA guide
guuaguuuuuauaagccugg

SEQ ID NO: 102614 - RNA, 20 nt, Artificial Sequence
  LRRK2 RNA guide
guucagguuuguagaaagaa

SEQ ID NO: 102615 - RNA, 20 nt, Artificial Sequence
  LRRK2 RNA guide
guugccugcuuuuagagaca

SEQ ID NO: 102616 - RNA, 20 nt, Artificial Sequence
  LRRK2 RNA guide
guugcuagggauacagguac

SEQ ID NO: 102617 - RNA, 20 nt, Artificial Sequence
  LRRK2 RNA guide
guuuagaccagccuaggcaa

SEQ ID NO: 102618 - RNA, 20 nt, Artificial Sequence
  LRRK2 RNA guide
guuucuuucuacaaaccuga

SEQ ID NO: 102619 - RNA, 20 nt, Artificial Sequence
  LRRK2 RNA guide
guuugcuauuuugccuaggc

SEQ ID NO: 102620 - RNA, 20 nt, Artificial Sequence
  LRRK2 RNA guide
guuuguagaaagaaacaaac

SEQ ID NO: 102621 - RNA, 20 nt, Artificial Sequence
  LRRK2 RNA guide
guuuguuucuuucuacaaac

SEQ ID NO: 102622 - RNA, 20 nt, Artificial Sequence
  LRRK2 RNA guide
guuuuuauaagccugguuca

SEQ ID NO: 102623 - RNA, 20 nt, Artificial Sequence
  LRRK2 RNA guide
guuuuuguugccugcuuuua

SEQ ID NO: 102624 - RNA, 20 nt, Artificial Sequence
  LRRK2 RNA guide
uaaaagcaggcaacaaaaac

SEQ ID NO: 102625 - RNA, 20 nt, Artificial Sequence
  LRRK2 RNA guide
uaaacuucuggguucaagug

SEQ ID NO: 102626 - RNA, 20 nt, Artificial Sequence
  LRRK2 RNA guide
uaagccugguucagguuugu

SEQ ID NO: 102627 - RNA, 20 nt, Artificial Sequence
  LRRK2 RNA guide
uaauucccuguagugaagcu

SEQ ID NO: 102628 - RNA, 20 nt, Artificial Sequence
  LRRK2 RNA guide
uacaaaccugaaccaggcuu

SEQ ID NO: 102629 - RNA, 20 nt, Artificial Sequence
  LRRK2 RNA guide
uacagggaauuaaauacaau

SEQ ID NO: 102630 - RNA, 20 nt, Artificial Sequence
  LRRK2 RNA guide
uaccuguaucccuagcaacu

SEQ ID NO: 102631 - RNA, 20 nt, Artificial Sequence
  LRRK2 RNA guide
uacucucauuguauuuaauu

SEQ ID NO: 102632 - RNA, 20 nt, Artificial Sequence
  LRRK2 RNA guide
uagaaagaaacaaacacaca

SEQ ID NO: 102633 - RNA, 20 nt, Artificial Sequence
  LRRK2 RNA guide
uagaccagccuaggcaaaau

SEQ ID NO: 102634 - RNA, 20 nt, Artificial Sequence
  LRRK2 RNA guide
uagcaaacccugucucucca

SEQ ID NO: 102635 - RNA, 20 nt, Artificial Sequence
  LRRK2 RNA guide
uaggcaaaauagcaaacccu

SEQ ID NO: 102636 - RNA, 20 nt, Artificial Sequence
  LRRK2 RNA guide
uaggcuggucuaaacuucug

SEQ ID NO: 102637 - RNA, 20 nt, Artificial Sequence
  LRRK2 RNA guide
uagggauacagguacaugcc

SEQ ID NO: 102638 - RNA, 20 nt, Artificial Sequence
  LRRK2 RNA guide
uagugaagcucauguguuuu

SEQ ID NO: 102639 - RNA, 20 nt, Artificial Sequence
  LRRK2 RNA guide
uaguuuuuauaagccugguu

SEQ ID NO: 102640 - RNA, 20 nt, Artificial Sequence
  LRRK2 RNA guide
uauaagccugguucagguuu

SEQ ID NO: 102641 - RNA, 20 nt, Artificial Sequence
  LRRK2 RNA guide
uaucccuagcaacucaggag

SEQ ID NO: 102642 - RNA, 20 nt, Artificial Sequence
  LRRK2 RNA guide
uauuuaauucccuguaguga

SEQ ID NO: 102643 - RNA, 20 nt, Artificial Sequence
  LRRK2 RNA guide
uauuuugccuaggcuggucu

SEQ ID NO: 102644 - RNA, 20 nt, Artificial Sequence
  LRRK2 RNA guide
ucaagugagcaauccuccug

SEQ ID NO: 102645 - RNA, 20 nt, Artificial Sequence
  LRRK2 RNA guide
ucacuacagggaauuaaaua

SEQ ID NO: 102646 - RNA, 20 nt, Artificial Sequence
  LRRK2 RNA guide
ucacuugaacccagaaguuu

SEQ ID NO: 102647 - RNA, 20 nt, Artificial Sequence
  LRRK2 RNA guide
ucagccuccugaguugcuag

SEQ ID NO: 102648 - RNA, 20 nt, Artificial Sequence
  LRRK2 RNA guide
ucagguuuguagaaagaaac

SEQ ID NO: 102649 - RNA, 20 nt, Artificial Sequence
  LRRK2 RNA guide
ucauguguuuuuguugccug

SEQ ID NO: 102650 - RNA, 20 nt, Artificial Sequence
  LRRK2 RNA guide
ucauucuuuuuuggagagac

SEQ ID NO: 102651 - RNA, 20 nt, Artificial Sequence
  LRRK2 RNA guide
ucauuguauuuaauucccug

SEQ ID NO: 102652 - RNA, 20 nt, Artificial Sequence
  LRRK2 RNA guide
ucccuagcaacucaggaggc

SEQ ID NO: 102653 - RNA, 20 nt, Artificial Sequence
  LRRK2 RNA guide
ucccuguagugaagcucaug

SEQ ID NO: 102654 - RNA, 20 nt, Artificial Sequence
  LRRK2 RNA guide
ucccuguuaguuuuuauaag

SEQ ID NO: 102655 - RNA, 20 nt, Artificial Sequence
  LRRK2 RNA guide
uccugaguugcuagggauac

SEQ ID NO: 102656 - RNA, 20 nt, Artificial Sequence
  LRRK2 RNA guide
uccugggcucaagugagcaa

SEQ ID NO: 102657 - RNA, 20 nt, Artificial Sequence
  LRRK2 RNA guide
ucuaaaagcaggcaacaaaa

SEQ ID NO: 102658 - RNA, 20 nt, Artificial Sequence
  LRRK2 RNA guide
ucuaaacuucuggguucaag

SEQ ID NO: 102659 - RNA, 20 nt, Artificial Sequence
  LRRK2 RNA guide
ucuacaaaccugaaccaggc

SEQ ID NO: 102660 - RNA, 20 nt, Artificial Sequence
  LRRK2 RNA guide
ucucauuguauuuaauuccc

SEQ ID NO: 102661 - RNA, 20 nt, Artificial Sequence
  LRRK2 RNA guide
ucucuaaaagcaggcaacaa

SEQ ID NO: 102662 - RNA, 20 nt, Artificial Sequence
  LRRK2 RNA guide
ucuugauuucuguuuuuaac

SEQ ID NO: 102663 - RNA, 20 nt, Artificial Sequence
  LRRK2 RNA guide
ucuuucuacaaaccugaacc

SEQ ID NO: 102664 - RNA, 20 nt, Artificial Sequence
  LRRK2 RNA guide
ucuuuuuuggagagacaggg

SEQ ID NO: 102665 - RNA, 20 nt, Artificial Sequence
  LRRK2 RNA guide
ugaaccaggcuuauaaaaac

SEQ ID NO: 102666 - RNA, 20 nt, Artificial Sequence
  LRRK2 RNA guide
ugaacccagaaguuuagacc

SEQ ID NO: 102667 - RNA, 20 nt, Artificial Sequence
  LRRK2 RNA guide
ugaagcucauguguuuuugu

SEQ ID NO: 102668 - RNA, 20 nt, Artificial Sequence
  LRRK2 RNA guide
ugagaguaauaaaaaauagg

SEQ ID NO: 102669 - RNA, 20 nt, Artificial Sequence
  LRRK2 RNA guide
ugagcuucacuacagggaau

SEQ ID NO: 102670 - RNA, 20 nt, Artificial Sequence
  LRRK2 RNA guide
ugaggcaggaggauugcuca

SEQ ID NO: 102671 - RNA, 20 nt, Artificial Sequence
  LRRK2 RNA guide
ugaguugcuagggauacagg

SEQ ID NO: 102672 - RNA, 20 nt, Artificial Sequence
  LRRK2 RNA guide
ugccuaggcuggucuaaacu

SEQ ID NO: 102673 - RNA, 20 nt, Artificial Sequence
  LRRK2 RNA guide
ugccugcuuuuagagacagg

SEQ ID NO: 102674 - RNA, 20 nt, Artificial Sequence
  LRRK2 RNA guide
ugccuggccauguguguuug

SEQ ID NO: 102675 - RNA, 20 nt, Artificial Sequence
  LRRK2 RNA guide
ugcuagggauacagguacau

SEQ ID NO: 102676 - RNA, 20 nt, Artificial Sequence
  LRRK2 RNA guide
ugcuauuuugccuaggcugg

SEQ ID NO: 102677 - RNA, 20 nt, Artificial Sequence
  LRRK2 RNA guide
ugcucaccuauuuuuuauua

SEQ ID NO: 102678 - RNA, 20 nt, Artificial Sequence
  LRRK2 RNA guide
uggagagacaggguuugcua

SEQ ID NO: 102679 - RNA, 20 nt, Artificial Sequence
  LRRK2 RNA guide
uggcauguaccuguaucccu

SEQ ID NO: 102680 - RNA, 20 nt, Artificial Sequence
  LRRK2 RNA guide
uggccauguguguuuguuuc

SEQ ID NO: 102681 - RNA, 20 nt, Artificial Sequence
  LRRK2 RNA guide
ugggcucaagugagcaaucc

SEQ ID NO: 102682 - RNA, 20 nt, Artificial Sequence
  LRRK2 RNA guide
uggucuaaacuucuggguuc

SEQ ID NO: 102683 - RNA, 20 nt, Artificial Sequence
  LRRK2 RNA guide
uggugugguggcauguaccu

SEQ ID NO: 102684 - RNA, 20 nt, Artificial Sequence
  LRRK2 RNA guide
ugguucagguuuguagaaag

SEQ ID NO: 102685 - RNA, 20 nt, Artificial Sequence
  LRRK2 RNA guide
uguaccuguaucccuagcaa

SEQ ID NO: 102686 - RNA, 20 nt, Artificial Sequence
  LRRK2 RNA guide
uguagaaagaaacaaacaca

SEQ ID NO: 102687 - RNA, 20 nt, Artificial Sequence
  LRRK2 RNA guide
uguagugaagcucauguguu

SEQ ID NO: 102688 - RNA, 20 nt, Artificial Sequence
  LRRK2 RNA guide
uguaucccuagcaacucagg

SEQ ID NO: 102689 - RNA, 20 nt, Artificial Sequence
  LRRK2 RNA guide
uguauuuaauucccuguagu

SEQ ID NO: 102690 - RNA, 20 nt, Artificial Sequence
  LRRK2 RNA guide
ugucucuaaaagcaggcaac

SEQ ID NO: 102691 - RNA, 20 nt, Artificial Sequence
  LRRK2 RNA guide
ugugguggcauguaccugua

SEQ ID NO: 102692 - RNA, 20 nt, Artificial Sequence
  LRRK2 RNA guide
uguguguuuguuucuuucua

SEQ ID NO: 102693 - RNA, 20 nt, Artificial Sequence
  LRRK2 RNA guide
uguguuuguuucuuucuaca

SEQ ID NO: 102694 - RNA, 20 nt, Artificial Sequence
  LRRK2 RNA guide
uguguuuuuguugccugcuu

SEQ ID NO: 102695 - RNA, 20 nt, Artificial Sequence
  LRRK2 RNA guide
uguuaguuuuuauaagccug

SEQ ID NO: 102696 - RNA, 20 nt, Artificial Sequence
  LRRK2 RNA guide
uguugccugcuuuuagagac

SEQ ID NO: 102697 - RNA, 20 nt, Artificial Sequence
  LRRK2 RNA guide
uguuucuuucuacaaaccug

SEQ ID NO: 102698 - RNA, 20 nt, Artificial Sequence
  LRRK2 RNA guide
uguuuguuucuuucuacaaa

SEQ ID NO: 102699 - RNA, 20 nt, Artificial Sequence
  LRRK2 RNA guide
uguuuuuguugccugcuuuu

SEQ ID NO: 102700 - RNA, 20 nt, Artificial Sequence
  LRRK2 RNA guide
uuaauucccuguagugaagc

SEQ ID NO: 102701 - RNA, 20 nt, Artificial Sequence
  LRRK2 RNA guide
uuagaccagccuaggcaaaa

SEQ ID NO: 102702 - RNA, 20 nt, Artificial Sequence
  LRRK2 RNA guide
uuaguuuuuauaagccuggu

SEQ ID NO: 102703 - RNA, 20 nt, Artificial Sequence
  LRRK2 RNA guide
uuauaagccugguucagguu

SEQ ID NO: 102704 - RNA, 20 nt, Artificial Sequence
  LRRK2 RNA guide
uucagguuuguagaaagaaa

SEQ ID NO: 102705 - RNA, 20 nt, Artificial Sequence
  LRRK2 RNA guide
uucauucuuuuuuggagaga

SEQ ID NO: 102706 - RNA, 20 nt, Artificial Sequence
  LRRK2 RNA guide
uucccuguagugaagcucau

SEQ ID NO: 102707 - RNA, 20 nt, Artificial Sequence
  LRRK2 RNA guide
uucccuguuaguuuuuauaa

SEQ ID NO: 102708 - RNA, 20 nt, Artificial Sequence
  LRRK2 RNA guide
uucuacaaaccugaaccagg

SEQ ID NO: 102709 - RNA, 20 nt, Artificial Sequence
  LRRK2 RNA guide
uucuuucuacaaaccugaac

SEQ ID NO: 102710 - RNA, 20 nt, Artificial Sequence
  LRRK2 RNA guide
uucuuuuuuggagagacagg

SEQ ID NO: 102711 - RNA, 20 nt, Artificial Sequence
  LRRK2 RNA guide
uugaacccagaaguuuagac

SEQ ID NO: 102712 - RNA, 20 nt, Artificial Sequence
  LRRK2 RNA guide
uugccuaggcuggucuaaac

SEQ ID NO: 102713 - RNA, 20 nt, Artificial Sequence
  LRRK2 RNA guide
uugccugcuuuuagagacag

SEQ ID NO: 102714 - RNA, 20 nt, Artificial Sequence
  LRRK2 RNA guide
uugcuagggauacagguaca

SEQ ID NO: 102715 - RNA, 20 nt, Artificial Sequence
  LRRK2 RNA guide
uugcuauuuugccuaggcug

SEQ ID NO: 102716 - RNA, 20 nt, Artificial Sequence
  LRRK2 RNA guide
uugcucacuugagcccagga

SEQ ID NO: 102717 - RNA, 20 nt, Artificial Sequence
  LRRK2 RNA guide
uuggagagacaggguuugcu

SEQ ID NO: 102718 - RNA, 20 nt, Artificial Sequence
  LRRK2 RNA guide
uuguagaaagaaacaaacac

SEQ ID NO: 102719 - RNA, 20 nt, Artificial Sequence
  LRRK2 RNA guide
uuguauuuaauucccuguag

SEQ ID NO: 102720 - RNA, 20 nt, Artificial Sequence
  LRRK2 RNA guide
uuguugccugcuuuuagaga

SEQ ID NO: 102721 - RNA, 20 nt, Artificial Sequence
  LRRK2 RNA guide
uuguuucuuucuacaaaccu

SEQ ID NO: 102722 - RNA, 20 nt, Artificial Sequence
  LRRK2 RNA guide
uuuaauucccuguagugaag

SEQ ID NO: 102723 - RNA, 20 nt, Artificial Sequence
  LRRK2 RNA guide
uuuagaccagccuaggcaaa

SEQ ID NO: 102724 - RNA, 20 nt, Artificial Sequence
  LRRK2 RNA guide
uuuauaagccugguucaggu

SEQ ID NO: 102725 - RNA, 20 nt, Artificial Sequence
  LRRK2 RNA guide
uuucagugagcuaugauugc

SEQ ID NO: 102726 - RNA, 20 nt, Artificial Sequence
  LRRK2 RNA guide
uuucauucuuuuuuggagag

SEQ ID NO: 102727 - RNA, 20 nt, Artificial Sequence
  LRRK2 RNA guide
uuucuacaaaccugaaccag

SEQ ID NO: 102728 - RNA, 20 nt, Artificial Sequence
  LRRK2 RNA guide
uuucuuucuacaaaccugaa

SEQ ID NO: 102729 - RNA, 20 nt, Artificial Sequence
  LRRK2 RNA guide
uuugccuaggcuggucuaaa

SEQ ID NO: 102730 - RNA, 20 nt, Artificial Sequence
  LRRK2 RNA guide
uuugcuauuuugccuaggcu

SEQ ID NO: 102731 - RNA, 20 nt, Artificial Sequence
  LRRK2 RNA guide
uuuggagagacaggguuugc

SEQ ID NO: 102732 - RNA, 20 nt, Artificial Sequence
  LRRK2 RNA guide
uuuguugccugcuuuuagag

SEQ ID NO: 102733 - RNA, 20 nt, Artificial Sequence
  LRRK2 RNA guide
uuuguuucuuucuacaaacc

SEQ ID NO: 102734 - RNA, 20 nt, Artificial Sequence
  LRRK2 RNA guide
uuuuauaagccugguucagg

SEQ ID NO: 102735 - RNA, 20 nt, Artificial Sequence
  LRRK2 RNA guide
uuuucauucuuuuuuggaga

SEQ ID NO: 102736 - RNA, 20 nt, Artificial Sequence
  LRRK2 RNA guide
uuuugccuaggcuggucuaa

SEQ ID NO: 102737 - RNA, 20 nt, Artificial Sequence
  LRRK2 RNA guide
uuuuggagagacaggguuug

SEQ ID NO: 102738 - RNA, 20 nt, Artificial Sequence
  LRRK2 RNA guide
uuuuguugccugcuuuuaga

SEQ ID NO: 102739 - RNA, 20 nt, Artificial Sequence
  LRRK2 RNA guide
uuuuuauaagccugguucag

SEQ ID NO: 102740 - RNA, 20 nt, Artificial Sequence
  LRRK2 RNA guide
uuuuuggagagacaggguuu

SEQ ID NO: 102741 - RNA, 20 nt, Artificial Sequence
  LRRK2 RNA guide
uuuuuguugccugcuuuuag

SEQ ID NO: 102742 - RNA, 20 nt, Artificial Sequence
  LRRK2 RNA guide
uuuuuuggagagacaggguu

SEQ ID NO: 102743 - RNA, 21 nt, Artificial Sequence
  LRRK2 RNA guide
aaaaacacaugagcuucacua

SEQ ID NO: 102744 - RNA, 21 nt, Artificial Sequence
  LRRK2 RNA guide
aaaacacaugagcuucacuac

SEQ ID NO: 102745 - RNA, 21 nt, Artificial Sequence
  LRRK2 RNA guide
aaaagaaugaaaaaauuagcc

SEQ ID NO: 102746 - RNA, 21 nt, Artificial Sequence
  LRRK2 RNA guide
aaaagcaggcaacaaaaacac

SEQ ID NO: 102747 - RNA, 21 nt, Artificial Sequence
  LRRK2 RNA guide
aaaauagcaaacccugucucu

SEQ ID NO: 102748 - RNA, 21 nt, Artificial Sequence
  LRRK2 RNA guide
aaacaaacacacauggccagg

SEQ ID NO: 102749 - RNA, 21 nt, Artificial Sequence
  LRRK2 RNA guide
aaacacaugagcuucacuaca

SEQ ID NO: 102750 - RNA, 21 nt, Artificial Sequence
  LRRK2 RNA guide
aaacccugucucuccaaaaaa

SEQ ID NO: 102751 - RNA, 21 nt, Artificial Sequence
  LRRK2 RNA guide
aaaccugaaccaggcuuauaa

SEQ ID NO: 102752 - RNA, 21 nt, Artificial Sequence
  LRRK2 RNA guide
aaacuccugggcucaagugag

SEQ ID NO: 102753 - RNA, 21 nt, Artificial Sequence
  LRRK2 RNA guide
aaagaaacaaacacacauggc

SEQ ID NO: 102754 - RNA, 21 nt, Artificial Sequence
  LRRK2 RNA guide
aaagaaugaaaaaauuagccu

SEQ ID NO: 102755 - RNA, 21 nt, Artificial Sequence
  LRRK2 RNA guide
aaagcaggcaacaaaaacaca

SEQ ID NO: 102756 - RNA, 21 nt, Artificial Sequence
  LRRK2 RNA guide
aaauagcaaacccugucucuc

SEQ ID NO: 102757 - RNA, 21 nt, Artificial Sequence
  LRRK2 RNA guide
aacaaaaacacaugagcuuca

SEQ ID NO: 102758 - RNA, 21 nt, Artificial Sequence
  LRRK2 RNA guide
aacaaacacacauggccaggc

SEQ ID NO: 102759 - RNA, 21 nt, Artificial Sequence
  LRRK2 RNA guide
aacacacauggccaggcacgg

SEQ ID NO: 102760 - RNA, 21 nt, Artificial Sequence
  LRRK2 RNA guide
aacacaugagcuucacuacag

SEQ ID NO: 102761 - RNA, 21 nt, Artificial Sequence
  LRRK2 RNA guide
aacauucccuguuaguuuuua

SEQ ID NO: 102762 - RNA, 21 nt, Artificial Sequence
  LRRK2 RNA guide
aaccaggcuuauaaaaacuaa

SEQ ID NO: 102763 - RNA, 21 nt, Artificial Sequence
  LRRK2 RNA guide
aacccagaaguuuagaccagc

SEQ ID NO: 102764 - RNA, 21 nt, Artificial Sequence
  LRRK2 RNA guide
aacccugucucuccaaaaaag

SEQ ID NO: 102765 - RNA, 21 nt, Artificial Sequence
  LRRK2 RNA guide
aaccugaaccaggcuuauaaa

SEQ ID NO: 102766 - RNA, 21 nt, Artificial Sequence
  LRRK2 RNA guide
aacuccugggcucaagugagc

SEQ ID NO: 102767 - RNA, 21 nt, Artificial Sequence
  LRRK2 RNA guide
aagaaacaaacacacauggcc

SEQ ID NO: 102768 - RNA, 21 nt, Artificial Sequence
  LRRK2 RNA guide
aagaaugaaaaaauuagccug

SEQ ID NO: 102769 - RNA, 21 nt, Artificial Sequence
  LRRK2 RNA guide
aagacccugucucuaaaagca

SEQ ID NO: 102770 - RNA, 21 nt, Artificial Sequence
  LRRK2 RNA guide
aagcaggcaacaaaaacacau

SEQ ID NO: 102771 - RNA, 21 nt, Artificial Sequence
  LRRK2 RNA guide
aagccugguucagguuuguag

SEQ ID NO: 102772 - RNA, 21 nt, Artificial Sequence
  LRRK2 RNA guide
aagcucauguguuuuuguugc

SEQ ID NO: 102773 - RNA, 21 nt, Artificial Sequence
  LRRK2 RNA guide
aagugagcaauccuccugccu

SEQ ID NO: 102774 - RNA, 21 nt, Artificial Sequence
  LRRK2 RNA guide
aaguuuagaccagccuaggca

SEQ ID NO: 102775 - RNA, 21 nt, Artificial Sequence
  LRRK2 RNA guide
aauagcaaacccugucucucc

SEQ ID NO: 102776 - RNA, 21 nt, Artificial Sequence
  LRRK2 RNA guide
aauggugcaaucauagcucac

SEQ ID NO: 102777 - RNA, 21 nt, Artificial Sequence
  LRRK2 RNA guide
aauucccuguagugaagcuca

SEQ ID NO: 102778 - RNA, 21 nt, Artificial Sequence
  LRRK2 RNA guide
acaaaaacacaugagcuucac

SEQ ID NO: 102779 - RNA, 21 nt, Artificial Sequence
  LRRK2 RNA guide
acaaacacacauggccaggca

SEQ ID NO: 102780 - RNA, 21 nt, Artificial Sequence
  LRRK2 RNA guide
acaaaccugaaccaggcuuau

SEQ ID NO: 102781 - RNA, 21 nt, Artificial Sequence
  LRRK2 RNA guide
acacacauggccaggcacggu

SEQ ID NO: 102782 - RNA, 21 nt, Artificial Sequence
  LRRK2 RNA guide
acacaugagcuucacuacagg

SEQ ID NO: 102783 - RNA, 21 nt, Artificial Sequence
  LRRK2 RNA guide
acaccaggcuaauuuuuucau

SEQ ID NO: 102784 - RNA, 21 nt, Artificial Sequence
  LRRK2 RNA guide
acagggaauuaaauacaauga

SEQ ID NO: 102785 - RNA, 21 nt, Artificial Sequence
  LRRK2 RNA guide
acaggguuugcuauuuugccu

SEQ ID NO: 102786 - RNA, 21 nt, Artificial Sequence
  LRRK2 RNA guide
acaugagcuucacuacaggga

SEQ ID NO: 102787 - RNA, 21 nt, Artificial Sequence
  LRRK2 RNA guide
acauucccuguuaguuuuuau

SEQ ID NO: 102788 - RNA, 21 nt, Artificial Sequence
  LRRK2 RNA guide
accacaccaggcuaauuuuuu

SEQ ID NO: 102789 - RNA, 21 nt, Artificial Sequence
  LRRK2 RNA guide
accagccuaggcaaaauagca

SEQ ID NO: 102790 - RNA, 21 nt, Artificial Sequence
  LRRK2 RNA guide
accaggcuuauaaaaacuaac

SEQ ID NO: 102791 - RNA, 21 nt, Artificial Sequence
  LRRK2 RNA guide
acccagaaguuuagaccagcc

SEQ ID NO: 102792 - RNA, 21 nt, Artificial Sequence
  LRRK2 RNA guide
acccugucucuaaaagcaggc

SEQ ID NO: 102793 - RNA, 21 nt, Artificial Sequence
  LRRK2 RNA guide
acccugucucuccaaaaaaga

SEQ ID NO: 102794 - RNA, 21 nt, Artificial Sequence
  LRRK2 RNA guide
accgugccuggccaugugugu

SEQ ID NO: 102795 - RNA, 21 nt, Artificial Sequence
  LRRK2 RNA guide
accugaaccaggcuuauaaaa

SEQ ID NO: 102796 - RNA, 21 nt, Artificial Sequence
  LRRK2 RNA guide
accuguaucccuagcaacuca

SEQ ID NO: 102797 - RNA, 21 nt, Artificial Sequence
  LRRK2 RNA guide
acuacagggaauuaaauacaa

SEQ ID NO: 102798 - RNA, 21 nt, Artificial Sequence
  LRRK2 RNA guide
acuccugggcucaagugagca

SEQ ID NO: 102799 - RNA, 21 nt, Artificial Sequence
  LRRK2 RNA guide
acucucauuguauuuaauucc

SEQ ID NO: 102800 - RNA, 21 nt, Artificial Sequence
  LRRK2 RNA guide
acuugaacccagaaguuuaga

SEQ ID NO: 102801 - RNA, 21 nt, Artificial Sequence
  LRRK2 RNA guide
agaaacaaacacacauggcca

SEQ ID NO: 102802 - RNA, 21 nt, Artificial Sequence
  LRRK2 RNA guide
agaaagaaacaaacacacaug

SEQ ID NO: 102803 - RNA, 21 nt, Artificial Sequence
  LRRK2 RNA guide
agaaguuuagaccagccuagg

SEQ ID NO: 102804 - RNA, 21 nt, Artificial Sequence
  LRRK2 RNA guide
agaaugaaaaaauuagccugg

SEQ ID NO: 102805 - RNA, 21 nt, Artificial Sequence
  LRRK2 RNA guide
agacaggguuugcuauuuugc

SEQ ID NO: 102806 - RNA, 21 nt, Artificial Sequence
  LRRK2 RNA guide
agaccagccuaggcaaaauag

SEQ ID NO: 102807 - RNA, 21 nt, Artificial Sequence
  LRRK2 RNA guide
agacccugucucuaaaagcag

SEQ ID NO: 102808 - RNA, 21 nt, Artificial Sequence
  LRRK2 RNA guide
agagacaggguuugcuauuuu

SEQ ID NO: 102809 - RNA, 21 nt, Artificial Sequence
  LRRK2 RNA guide
agcaaacccugucucuccaaa

SEQ ID NO: 102810 - RNA, 21 nt, Artificial Sequence
  LRRK2 RNA guide
agcaagacccugucucuaaaa

SEQ ID NO: 102811 - RNA, 21 nt, Artificial Sequence
  LRRK2 RNA guide
agcaggcaacaaaaacacaug

SEQ ID NO: 102812 - RNA, 21 nt, Artificial Sequence
  LRRK2 RNA guide
agccaccgugccuggccaugu

SEQ ID NO: 102813 - RNA, 21 nt, Artificial Sequence
  LRRK2 RNA guide
agccuaggcaaaauagcaaac

SEQ ID NO: 102814 - RNA, 21 nt, Artificial Sequence
  LRRK2 RNA guide
agccuccugaguugcuaggga

SEQ ID NO: 102815 - RNA, 21 nt, Artificial Sequence
  LRRK2 RNA guide
agccugguucagguuuguaga

SEQ ID NO: 102816 - RNA, 21 nt, Artificial Sequence
  LRRK2 RNA guide
agcucauguguuuuuguugcc

SEQ ID NO: 102817 - RNA, 21 nt, Artificial Sequence
  LRRK2 RNA guide
agcuucacuacagggaauuaa

SEQ ID NO: 102818 - RNA, 21 nt, Artificial Sequence
  LRRK2 RNA guide
aggaggauugcucacuugagc

SEQ ID NO: 102819 - RNA, 21 nt, Artificial Sequence
  LRRK2 RNA guide
aggaucacuugaacccagaag

SEQ ID NO: 102820 - RNA, 21 nt, Artificial Sequence
  LRRK2 RNA guide
aggauugcucacuugagccca

SEQ ID NO: 102821 - RNA, 21 nt, Artificial Sequence
  LRRK2 RNA guide
aggcaaaauagcaaacccugu

SEQ ID NO: 102822 - RNA, 21 nt, Artificial Sequence
  LRRK2 RNA guide
aggcaacaaaaacacaugagc

SEQ ID NO: 102823 - RNA, 21 nt, Artificial Sequence
  LRRK2 RNA guide
aggcaggaggauugcucacuu

SEQ ID NO: 102824 - RNA, 21 nt, Artificial Sequence
  LRRK2 RNA guide
aggcuggucuaaacuucuggg

SEQ ID NO: 102825 - RNA, 21 nt, Artificial Sequence
  LRRK2 RNA guide
aggcuuauaaaaacuaacagg

SEQ ID NO: 102826 - RNA, 21 nt, Artificial Sequence
  LRRK2 RNA guide
agggauacagguacaugccac

SEQ ID NO: 102827 - RNA, 21 nt, Artificial Sequence
  LRRK2 RNA guide
aggguuugcuauuuugccuag

SEQ ID NO: 102828 - RNA, 21 nt, Artificial Sequence
  LRRK2 RNA guide
agguuuguagaaagaaacaaa

SEQ ID NO: 102829 - RNA, 21 nt, Artificial Sequence
  LRRK2 RNA guide
agugaagcucauguguuuuug

SEQ ID NO: 102830 - RNA, 21 nt, Artificial Sequence
  LRRK2 RNA guide
agugagcaauccuccugccuc

SEQ ID NO: 102831 - RNA, 21 nt, Artificial Sequence
  LRRK2 RNA guide
aguugcuagggauacagguac

SEQ ID NO: 102832 - RNA, 21 nt, Artificial Sequence
  LRRK2 RNA guide
aguuuagaccagccuaggcaa

SEQ ID NO: 102833 - RNA, 21 nt, Artificial Sequence
  LRRK2 RNA guide
aguuuuuauaagccugguuca

SEQ ID NO: 102834 - RNA, 21 nt, Artificial Sequence
  LRRK2 RNA guide
auaagccugguucagguuugu

SEQ ID NO: 102835 - RNA, 21 nt, Artificial Sequence
  LRRK2 RNA guide
auacagguacaugccaccaca

SEQ ID NO: 102836 - RNA, 21 nt, Artificial Sequence
  LRRK2 RNA guide
auagcaaacccugucucucca

SEQ ID NO: 102837 - RNA, 21 nt, Artificial Sequence
  LRRK2 RNA guide
aucacuugaacccagaaguuu

SEQ ID NO: 102838 - RNA, 21 nt, Artificial Sequence
  LRRK2 RNA guide
aucccuagcaacucaggaggc

SEQ ID NO: 102839 - RNA, 21 nt, Artificial Sequence
  LRRK2 RNA guide
aucuugauuucuguuuuuaac

SEQ ID NO: 102840 - RNA, 21 nt, Artificial Sequence
  LRRK2 RNA guide
augagaguaauaaaaaauagg

SEQ ID NO: 102841 - RNA, 21 nt, Artificial Sequence
  LRRK2 RNA guide
augagcuucacuacagggaau

SEQ ID NO: 102842 - RNA, 21 nt, Artificial Sequence
  LRRK2 RNA guide
auggugcaaucauagcucacu

SEQ ID NO: 102843 - RNA, 21 nt, Artificial Sequence
  LRRK2 RNA guide
auguaccuguaucccuagcaa

SEQ ID NO: 102844 - RNA, 21 nt, Artificial Sequence
  LRRK2 RNA guide
auguguguuuguuucuuucua

SEQ ID NO: 102845 - RNA, 21 nt, Artificial Sequence
  LRRK2 RNA guide
auguguuuuuguugccugcuu

SEQ ID NO: 102846 - RNA, 21 nt, Artificial Sequence
  LRRK2 RNA guide
auucccuguagugaagcucau

SEQ ID NO: 102847 - RNA, 21 nt, Artificial Sequence
  LRRK2 RNA guide
auucccuguuaguuuuuauaa

SEQ ID NO: 102848 - RNA, 21 nt, Artificial Sequence
  LRRK2 RNA guide
auucuuuuuuggagagacagg

SEQ ID NO: 102849 - RNA, 21 nt, Artificial Sequence
  LRRK2 RNA guide
auugcucacuugagcccagga

SEQ ID NO: 102850 - RNA, 21 nt, Artificial Sequence
  LRRK2 RNA guide
auuguauuuaauucccuguag

SEQ ID NO: 102851 - RNA, 21 nt, Artificial Sequence
  LRRK2 RNA guide
auuuaauucccuguagugaag

SEQ ID NO: 102852 - RNA, 21 nt, Artificial Sequence
  LRRK2 RNA guide
auuuugccuaggcuggucuaa

SEQ ID NO: 102853 - RNA, 21 nt, Artificial Sequence
  LRRK2 RNA guide
caaaaacacaugagcuucacu

SEQ ID NO: 102854 - RNA, 21 nt, Artificial Sequence
  LRRK2 RNA guide
caaaauagcaaacccugucuc

SEQ ID NO: 102855 - RNA, 21 nt, Artificial Sequence
  LRRK2 RNA guide
caaacacacauggccaggcac

SEQ ID NO: 102856 - RNA, 21 nt, Artificial Sequence
  LRRK2 RNA guide
caaacccugucucuccaaaaa

SEQ ID NO: 102857 - RNA, 21 nt, Artificial Sequence
  LRRK2 RNA guide
caaaccugaaccaggcuuaua

SEQ ID NO: 102858 - RNA, 21 nt, Artificial Sequence
  LRRK2 RNA guide
caaacuccugggcucaaguga

SEQ ID NO: 102859 - RNA, 21 nt, Artificial Sequence
  LRRK2 RNA guide
caacaaaaacacaugagcuuc

SEQ ID NO: 102860 - RNA, 21 nt, Artificial Sequence
  LRRK2 RNA guide
caagacccugucucuaaaagc

SEQ ID NO: 102861 - RNA, 21 nt, Artificial Sequence
  LRRK2 RNA guide
caagugagcaauccuccugcc

SEQ ID NO: 102862 - RNA, 21 nt, Artificial Sequence
  LRRK2 RNA guide
cacacauggccaggcacggug

SEQ ID NO: 102863 - RNA, 21 nt, Artificial Sequence
  LRRK2 RNA guide
cacaccaggcuaauuuuuuca

SEQ ID NO: 102864 - RNA, 21 nt, Artificial Sequence
  LRRK2 RNA guide
cacagcaagacccugucucua

SEQ ID NO: 102865 - RNA, 21 nt, Artificial Sequence
  LRRK2 RNA guide
cacaugagcuucacuacaggg

SEQ ID NO: 102866 - RNA, 21 nt, Artificial Sequence
  LRRK2 RNA guide
caccaggcuaauuuuuucauu

SEQ ID NO: 102867 - RNA, 21 nt, Artificial Sequence
  LRRK2 RNA guide
caccgugccuggccaugugug

SEQ ID NO: 102868 - RNA, 21 nt, Artificial Sequence
  LRRK2 RNA guide
cacuacagggaauuaaauaca

SEQ ID NO: 102869 - RNA, 21 nt, Artificial Sequence
  LRRK2 RNA guide
cacuugaacccagaaguuuag

SEQ ID NO: 102870 - RNA, 21 nt, Artificial Sequence
  LRRK2 RNA guide
cagaaguuuagaccagccuag

SEQ ID NO: 102871 - RNA, 21 nt, Artificial Sequence
  LRRK2 RNA guide
cagcaagacccugucucuaaa

SEQ ID NO: 102872 - RNA, 21 nt, Artificial Sequence
  LRRK2 RNA guide
cagccuaggcaaaauagcaaa

SEQ ID NO: 102873 - RNA, 21 nt, Artificial Sequence
  LRRK2 RNA guide
cagccuccugaguugcuaggg

SEQ ID NO: 102874 - RNA, 21 nt, Artificial Sequence
  LRRK2 RNA guide
caggaggauugcucacuugag

SEQ ID NO: 102875 - RNA, 21 nt, Artificial Sequence
  LRRK2 RNA guide
caggcaacaaaaacacaugag

SEQ ID NO: 102876 - RNA, 21 nt, Artificial Sequence
  LRRK2 RNA guide
caggcuuauaaaaacuaacag

SEQ ID NO: 102877 - RNA, 21 nt, Artificial Sequence
  LRRK2 RNA guide
cagggaauuaaauacaaugag

SEQ ID NO: 102878 - RNA, 21 nt, Artificial Sequence
  LRRK2 RNA guide
caggguuugcuauuuugccua

SEQ ID NO: 102879 - RNA, 21 nt, Artificial Sequence
  LRRK2 RNA guide
cagguuuguagaaagaaacaa

SEQ ID NO: 102880 - RNA, 21 nt, Artificial Sequence
  LRRK2 RNA guide
cauacucaaaaguuugcuuau

SEQ ID NO: 102881 - RNA, 21 nt, Artificial Sequence
  LRRK2 RNA guide
caugagcuucacuacagggaa

SEQ ID NO: 102882 - RNA, 21 nt, Artificial Sequence
  LRRK2 RNA guide
cauguaccuguaucccuagca

SEQ ID NO: 102883 - RNA, 21 nt, Artificial Sequence
  LRRK2 RNA guide
cauguguguuuguuucuuucu

SEQ ID NO: 102884 - RNA, 21 nt, Artificial Sequence
  LRRK2 RNA guide
cauguguuuuuguugccugcu

SEQ ID NO: 102885 - RNA, 21 nt, Artificial Sequence
  LRRK2 RNA guide
cauucccuguuaguuuuuaua

SEQ ID NO: 102886 - RNA, 21 nt, Artificial Sequence
  LRRK2 RNA guide
cauucuuuuuuggagagacag

SEQ ID NO: 102887 - RNA, 21 nt, Artificial Sequence
  LRRK2 RNA guide
cauuguauuuaauucccugua

SEQ ID NO: 102888 - RNA, 21 nt, Artificial Sequence
  LRRK2 RNA guide
ccacaccaggcuaauuuuuuc

SEQ ID NO: 102889 - RNA, 21 nt, Artificial Sequence
  LRRK2 RNA guide
ccaccgugccuggccaugugu

SEQ ID NO: 102890 - RNA, 21 nt, Artificial Sequence
  LRRK2 RNA guide
ccagaaguuuagaccagccua

SEQ ID NO: 102891 - RNA, 21 nt, Artificial Sequence
  LRRK2 RNA guide
ccagccuaggcaaaauagcaa

SEQ ID NO: 102892 - RNA, 21 nt, Artificial Sequence
  LRRK2 RNA guide
ccaggcuuauaaaaacuaaca

SEQ ID NO: 102893 - RNA, 21 nt, Artificial Sequence
  LRRK2 RNA guide
ccauguguguuuguuucuuuc

SEQ ID NO: 102894 - RNA, 21 nt, Artificial Sequence
  LRRK2 RNA guide
cccagaaguuuagaccagccu

SEQ ID NO: 102895 - RNA, 21 nt, Artificial Sequence
  LRRK2 RNA guide
cccuguagugaagcucaugug

SEQ ID NO: 102896 - RNA, 21 nt, Artificial Sequence
  LRRK2 RNA guide
cccugucucuaaaagcaggca

SEQ ID NO: 102897 - RNA, 21 nt, Artificial Sequence
  LRRK2 RNA guide
cccugucucuccaaaaaagaa

SEQ ID NO: 102898 - RNA, 21 nt, Artificial Sequence
  LRRK2 RNA guide
cccuguuaguuuuuauaagcc

SEQ ID NO: 102899 - RNA, 21 nt, Artificial Sequence
  LRRK2 RNA guide
ccgugccuggccauguguguu

SEQ ID NO: 102900 - RNA, 21 nt, Artificial Sequence
  LRRK2 RNA guide
ccuaggcaaaauagcaaaccc

SEQ ID NO: 102901 - RNA, 21 nt, Artificial Sequence
  LRRK2 RNA guide
ccuaggcuggucuaaacuucu

SEQ ID NO: 102902 - RNA, 21 nt, Artificial Sequence
  LRRK2 RNA guide
ccucagccuccugaguugcua

SEQ ID NO: 102903 - RNA, 21 nt, Artificial Sequence
  LRRK2 RNA guide
ccuccugaguugcuagggaua

SEQ ID NO: 102904 - RNA, 21 nt, Artificial Sequence
  LRRK2 RNA guide
ccugaaccaggcuuauaaaaa

SEQ ID NO: 102905 - RNA, 21 nt, Artificial Sequence
  LRRK2 RNA guide
ccugaguugcuagggauacag

SEQ ID NO: 102906 - RNA, 21 nt, Artificial Sequence
  LRRK2 RNA guide
ccugcuuuuagagacaggguc

SEQ ID NO: 102907 - RNA, 21 nt, Artificial Sequence
  LRRK2 RNA guide
ccuggccauguguguuuguuu

SEQ ID NO: 102908 - RNA, 21 nt, Artificial Sequence
  LRRK2 RNA guide
ccugggcucaagugagcaauc

SEQ ID NO: 102909 - RNA, 21 nt, Artificial Sequence
  LRRK2 RNA guide
ccuggugugguggcauguacc

SEQ ID NO: 102910 - RNA, 21 nt, Artificial Sequence
  LRRK2 RNA guide
ccugguucagguuuguagaaa

SEQ ID NO: 102911 - RNA, 21 nt, Artificial Sequence
  LRRK2 RNA guide
ccuguagugaagcucaugugu

SEQ ID NO: 102912 - RNA, 21 nt, Artificial Sequence
  LRRK2 RNA guide
ccuguaucccuagcaacucag

SEQ ID NO: 102913 - RNA, 21 nt, Artificial Sequence
  LRRK2 RNA guide
ccugucucuaaaagcaggcaa

SEQ ID NO: 102914 - RNA, 21 nt, Artificial Sequence
  LRRK2 RNA guide
ccugucucuccaaaaaagaau

SEQ ID NO: 102915 - RNA, 21 nt, Artificial Sequence
  LRRK2 RNA guide
ccuguuaguuuuuauaagccu

SEQ ID NO: 102916 - RNA, 21 nt, Artificial Sequence
  LRRK2 RNA guide
cgugccuggccauguguguuu

SEQ ID NO: 102917 - RNA, 21 nt, Artificial Sequence
  LRRK2 RNA guide
cuaaaagcaggcaacaaaaac

SEQ ID NO: 102918 - RNA, 21 nt, Artificial Sequence
  LRRK2 RNA guide
cuaaacuucuggguucaagug

SEQ ID NO: 102919 - RNA, 21 nt, Artificial Sequence
  LRRK2 RNA guide
cuacaaaccugaaccaggcuu

SEQ ID NO: 102920 - RNA, 21 nt, Artificial Sequence
  LRRK2 RNA guide
cuacagggaauuaaauacaau

SEQ ID NO: 102921 - RNA, 21 nt, Artificial Sequence
  LRRK2 RNA guide
cuaggcaaaauagcaaacccu

SEQ ID NO: 102922 - RNA, 21 nt, Artificial Sequence
  LRRK2 RNA guide
cuaggcuggucuaaacuucug

SEQ ID NO: 102923 - RNA, 21 nt, Artificial Sequence
  LRRK2 RNA guide
cuagggauacagguacaugcc

SEQ ID NO: 102924 - RNA, 21 nt, Artificial Sequence
  LRRK2 RNA guide
cuauuuugccuaggcuggucu

SEQ ID NO: 102925 - RNA, 21 nt, Artificial Sequence
  LRRK2 RNA guide
cucaagugagcaauccuccug

SEQ ID NO: 102926 - RNA, 21 nt, Artificial Sequence
  LRRK2 RNA guide
cucagccuccugaguugcuag

SEQ ID NO: 102927 - RNA, 21 nt, Artificial Sequence
  LRRK2 RNA guide
cucauguguuuuuguugccug

SEQ ID NO: 102928 - RNA, 21 nt, Artificial Sequence
  LRRK2 RNA guide
cucauuguauuuaauucccug

SEQ ID NO: 102929 - RNA, 21 nt, Artificial Sequence
  LRRK2 RNA guide
cuccugaguugcuagggauac

SEQ ID NO: 102930 - RNA, 21 nt, Artificial Sequence
  LRRK2 RNA guide
cuccugggcucaagugagcaa

SEQ ID NO: 102931 - RNA, 21 nt, Artificial Sequence
  LRRK2 RNA guide
cucuaaaagcaggcaacaaaa

SEQ ID NO: 102932 - RNA, 21 nt, Artificial Sequence
  LRRK2 RNA guide
cucucauuguauuuaauuccc

SEQ ID NO: 102933 - RNA, 21 nt, Artificial Sequence
  LRRK2 RNA guide
cugaaccaggcuuauaaaaac

SEQ ID NO: 102934 - RNA, 21 nt, Artificial Sequence
  LRRK2 RNA guide
cugaggcaggaggauugcuca

SEQ ID NO: 102935 - RNA, 21 nt, Artificial Sequence
  LRRK2 RNA guide
cugaguugcuagggauacagg

SEQ ID NO: 102936 - RNA, 21 nt, Artificial Sequence
  LRRK2 RNA guide
cugcuuuuagagacagggucu

SEQ ID NO: 102937 - RNA, 21 nt, Artificial Sequence
  LRRK2 RNA guide
cuggaguuaaaaacagaaauc

SEQ ID NO: 102938 - RNA, 21 nt, Artificial Sequence
  LRRK2 RNA guide
cuggccauguguguuuguuuc

SEQ ID NO: 102939 - RNA, 21 nt, Artificial Sequence
  LRRK2 RNA guide
cugggcucaagugagcaaucc

SEQ ID NO: 102940 - RNA, 21 nt, Artificial Sequence
  LRRK2 RNA guide
cuggucuaaacuucuggguuc

SEQ ID NO: 102941 - RNA, 21 nt, Artificial Sequence
  LRRK2 RNA guide
cuggugugguggcauguaccu

SEQ ID NO: 102942 - RNA, 21 nt, Artificial Sequence
  LRRK2 RNA guide
cugguucagguuuguagaaag

SEQ ID NO: 102943 - RNA, 21 nt, Artificial Sequence
  LRRK2 RNA guide
cuguagugaagcucauguguu

SEQ ID NO: 102944 - RNA, 21 nt, Artificial Sequence
  LRRK2 RNA guide
cuguaucccuagcaacucagg

SEQ ID NO: 102945 - RNA, 21 nt, Artificial Sequence
  LRRK2 RNA guide
cugucucuaaaagcaggcaac

SEQ ID NO: 102946 - RNA, 21 nt, Artificial Sequence
  LRRK2 RNA guide
cugucucuccaaaaaagaaug

SEQ ID NO: 102947 - RNA, 21 nt, Artificial Sequence
  LRRK2 RNA guide
cuguuaguuuuuauaagccug

SEQ ID NO: 102948 - RNA, 21 nt, Artificial Sequence
  LRRK2 RNA guide
cuucacuacagggaauuaaau

SEQ ID NO: 102949 - RNA, 21 nt, Artificial Sequence
  LRRK2 RNA guide
cuugaacccagaaguuuagac

SEQ ID NO: 102950 - RNA, 21 nt, Artificial Sequence
  LRRK2 RNA guide
cuuucuacaaaccugaaccag

SEQ ID NO: 102951 - RNA, 21 nt, Artificial Sequence
  LRRK2 RNA guide
cuuuuuuggagagacaggguu

SEQ ID NO: 102952 - RNA, 21 nt, Artificial Sequence
  LRRK2 RNA guide
gaaacaaacacacauggccag

SEQ ID NO: 102953 - RNA, 21 nt, Artificial Sequence
  LRRK2 RNA guide
gaaagaaacaaacacacaugg

SEQ ID NO: 102954 - RNA, 21 nt, Artificial Sequence
  LRRK2 RNA guide
gaaccaggcuuauaaaaacua

SEQ ID NO: 102955 - RNA, 21 nt, Artificial Sequence
  LRRK2 RNA guide
gaacccagaaguuuagaccag

SEQ ID NO: 102956 - RNA, 21 nt, Artificial Sequence
  LRRK2 RNA guide
gaagcucauguguuuuuguug

SEQ ID NO: 102957 - RNA, 21 nt, Artificial Sequence
  LRRK2 RNA guide
gaaguuuagaccagccuaggc

SEQ ID NO: 102958 - RNA, 21 nt, Artificial Sequence
  LRRK2 RNA guide
gaaugaaaaaauuagccuggu

SEQ ID NO: 102959 - RNA, 21 nt, Artificial Sequence
  LRRK2 RNA guide
gacaggguuugcuauuuugcc

SEQ ID NO: 102960 - RNA, 21 nt, Artificial Sequence
  LRRK2 RNA guide
gaccagccuaggcaaaauagc

SEQ ID NO: 102961 - RNA, 21 nt, Artificial Sequence
  LRRK2 RNA guide
gacccugucucuaaaagcagg

SEQ ID NO: 102962 - RNA, 21 nt, Artificial Sequence
  LRRK2 RNA guide
gagacaggguuugcuauuuug

SEQ ID NO: 102963 - RNA, 21 nt, Artificial Sequence
  LRRK2 RNA guide
gagagacaggguuugcuauuu

SEQ ID NO: 102964 - RNA, 21 nt, Artificial Sequence
  LRRK2 RNA guide
gagaguaauaaaaaauaggug

SEQ ID NO: 102965 - RNA, 21 nt, Artificial Sequence
  LRRK2 RNA guide
gagccaccgugccuggccaug

SEQ ID NO: 102966 - RNA, 21 nt, Artificial Sequence
  LRRK2 RNA guide
gagcuucacuacagggaauua

SEQ ID NO: 102967 - RNA, 21 nt, Artificial Sequence
  LRRK2 RNA guide
gaggaucacuugaacccagaa

SEQ ID NO: 102968 - RNA, 21 nt, Artificial Sequence
  LRRK2 RNA guide
gaggauugcucacuugagccc

SEQ ID NO: 102969 - RNA, 21 nt, Artificial Sequence
  LRRK2 RNA guide
gaggcaggaggauugcucacu

SEQ ID NO: 102970 - RNA, 21 nt, Artificial Sequence
  LRRK2 RNA guide
gaggcugaggcaggaggauug

SEQ ID NO: 102971 - RNA, 21 nt, Artificial Sequence
  LRRK2 RNA guide
gaguugcuagggauacaggua

SEQ ID NO: 102972 - RNA, 21 nt, Artificial Sequence
  LRRK2 RNA guide
gauacagguacaugccaccac

SEQ ID NO: 102973 - RNA, 21 nt, Artificial Sequence
  LRRK2 RNA guide
gaucacuugaacccagaaguu

SEQ ID NO: 102974 - RNA, 21 nt, Artificial Sequence
  LRRK2 RNA guide
gauugcucacuugagcccagg

SEQ ID NO: 102975 - RNA, 21 nt, Artificial Sequence
  LRRK2 RNA guide
gcaaaauagcaaacccugucu

SEQ ID NO: 102976 - RNA, 21 nt, Artificial Sequence
  LRRK2 RNA guide
gcaaacccugucucuccaaaa

SEQ ID NO: 102977 - RNA, 21 nt, Artificial Sequence
  LRRK2 RNA guide
gcaaauaagcaaacuuuugag

SEQ ID NO: 102978 - RNA, 21 nt, Artificial Sequence
  LRRK2 RNA guide
gcaacaaaaacacaugagcuu

SEQ ID NO: 102979 - RNA, 21 nt, Artificial Sequence
  LRRK2 RNA guide
gcaagacccugucucuaaaag

SEQ ID NO: 102980 - RNA, 21 nt, Artificial Sequence
  LRRK2 RNA guide
gcaggaggauugcucacuuga

SEQ ID NO: 102981 - RNA, 21 nt, Artificial Sequence
  LRRK2 RNA guide
gcaggcaacaaaaacacauga

SEQ ID NO: 102982 - RNA, 21 nt, Artificial Sequence
  LRRK2 RNA guide
gcauguaccuguaucccuagc

SEQ ID NO: 102983 - RNA, 21 nt, Artificial Sequence
  LRRK2 RNA guide
gccauguguguuuguuucuuu

SEQ ID NO: 102984 - RNA, 21 nt, Artificial Sequence
  LRRK2 RNA guide
gccuaggcaaaauagcaaacc

SEQ ID NO: 102985 - RNA, 21 nt, Artificial Sequence
  LRRK2 RNA guide
gccuaggcuggucuaaacuuc

SEQ ID NO: 102986 - RNA, 21 nt, Artificial Sequence
  LRRK2 RNA guide
gccucagccuccugaguugcu

SEQ ID NO: 102987 - RNA, 21 nt, Artificial Sequence
  LRRK2 RNA guide
gccuccugaguugcuagggau

SEQ ID NO: 102988 - RNA, 21 nt, Artificial Sequence
  LRRK2 RNA guide
gccugcuuuuagagacagggu

SEQ ID NO: 102989 - RNA, 21 nt, Artificial Sequence
  LRRK2 RNA guide
gccuggccauguguguuuguu

SEQ ID NO: 102990 - RNA, 21 nt, Artificial Sequence
  LRRK2 RNA guide
gccugguucagguuuguagaa

SEQ ID NO: 102991 - RNA, 21 nt, Artificial Sequence
  LRRK2 RNA guide
gcuauuuugccuaggcugguc

SEQ ID NO: 102992 - RNA, 21 nt, Artificial Sequence
  LRRK2 RNA guide
gcucaagugagcaauccuccu

SEQ ID NO: 102993 - RNA, 21 nt, Artificial Sequence
  LRRK2 RNA guide
gcucaccuauuuuuuauuacu

SEQ ID NO: 102994 - RNA, 21 nt, Artificial Sequence
  LRRK2 RNA guide
gcucauguguuuuuguugccu

SEQ ID NO: 102995 - RNA, 21 nt, Artificial Sequence
  LRRK2 RNA guide
gcugaggcaggaggauugcuc

SEQ ID NO: 102996 - RNA, 21 nt, Artificial Sequence
  LRRK2 RNA guide
gcuggucuaaacuucuggguu

SEQ ID NO: 102997 - RNA, 21 nt, Artificial Sequence
  LRRK2 RNA guide
gcuuauaaaaacuaacaggga

SEQ ID NO: 102998 - RNA, 21 nt, Artificial Sequence
  LRRK2 RNA guide
gcuucacuacagggaauuaaa

SEQ ID NO: 102999 - RNA, 21 nt, Artificial Sequence
  LRRK2 RNA guide
gcuuuuagagacagggucuug

SEQ ID NO: 103000 - RNA, 21 nt, Artificial Sequence
  LRRK2 RNA guide
ggagagacaggguuugcuauu

SEQ ID NO: 103001 - RNA, 21 nt, Artificial Sequence
  LRRK2 RNA guide
ggaggauugcucacuugagcc

SEQ ID NO: 103002 - RNA, 21 nt, Artificial Sequence
  LRRK2 RNA guide
ggauacagguacaugccacca

SEQ ID NO: 103003 - RNA, 21 nt, Artificial Sequence
  LRRK2 RNA guide
ggaucacuugaacccagaagu

SEQ ID NO: 103004 - RNA, 21 nt, Artificial Sequence
  LRRK2 RNA guide
ggauugcucacuugagcccag

SEQ ID NO: 103005 - RNA, 21 nt, Artificial Sequence
  LRRK2 RNA guide
ggcaaaauagcaaacccuguc

SEQ ID NO: 103006 - RNA, 21 nt, Artificial Sequence
  LRRK2 RNA guide
ggcaacaaaaacacaugagcu

SEQ ID NO: 103007 - RNA, 21 nt, Artificial Sequence
  LRRK2 RNA guide
ggcaggaggauugcucacuug

SEQ ID NO: 103008 - RNA, 21 nt, Artificial Sequence
  LRRK2 RNA guide
ggcauguaccuguaucccuag

SEQ ID NO: 103009 - RNA, 21 nt, Artificial Sequence
  LRRK2 RNA guide
ggccauguguguuuguuucuu

SEQ ID NO: 103010 - RNA, 21 nt, Artificial Sequence
  LRRK2 RNA guide
ggcucaagugagcaauccucc

SEQ ID NO: 103011 - RNA, 21 nt, Artificial Sequence
  LRRK2 RNA guide
ggcugaggcaggaggauugcu

SEQ ID NO: 103012 - RNA, 21 nt, Artificial Sequence
  LRRK2 RNA guide
ggcuggucuaaacuucugggu

SEQ ID NO: 103013 - RNA, 21 nt, Artificial Sequence
  LRRK2 RNA guide
ggcuuauaaaaacuaacaggg

SEQ ID NO: 103014 - RNA, 21 nt, Artificial Sequence
  LRRK2 RNA guide
gggauacagguacaugccacc

SEQ ID NO: 103015 - RNA, 21 nt, Artificial Sequence
  LRRK2 RNA guide
gggcucaagugagcaauccuc

SEQ ID NO: 103016 - RNA, 21 nt, Artificial Sequence
  LRRK2 RNA guide
ggguuugcuauuuugccuagg

SEQ ID NO: 103017 - RNA, 21 nt, Artificial Sequence
  LRRK2 RNA guide
ggucuaaacuucuggguucaa

SEQ ID NO: 103018 - RNA, 21 nt, Artificial Sequence
  LRRK2 RNA guide
gguggcauguaccuguauccc

SEQ ID NO: 103019 - RNA, 21 nt, Artificial Sequence
  LRRK2 RNA guide
ggugugguggcauguaccugu

SEQ ID NO: 103020 - RNA, 21 nt, Artificial Sequence
  LRRK2 RNA guide
gguucagguuuguagaaagaa

SEQ ID NO: 103021 - RNA, 21 nt, Artificial Sequence
  LRRK2 RNA guide
gguuugcuauuuugccuaggc

SEQ ID NO: 103022 - RNA, 21 nt, Artificial Sequence
  LRRK2 RNA guide
gguuuguagaaagaaacaaac

SEQ ID NO: 103023 - RNA, 21 nt, Artificial Sequence
  LRRK2 RNA guide
guaccuguaucccuagcaacu

SEQ ID NO: 103024 - RNA, 21 nt, Artificial Sequence
  LRRK2 RNA guide
guagaaagaaacaaacacaca

SEQ ID NO: 103025 - RNA, 21 nt, Artificial Sequence
  LRRK2 RNA guide
guagugaagcucauguguuuu

SEQ ID NO: 103026 - RNA, 21 nt, Artificial Sequence
  LRRK2 RNA guide
guaucccuagcaacucaggag

SEQ ID NO: 103027 - RNA, 21 nt, Artificial Sequence
  LRRK2 RNA guide
guauuuaauucccuguaguga

SEQ ID NO: 103028 - RNA, 21 nt, Artificial Sequence
  LRRK2 RNA guide
gucuaaacuucuggguucaag

SEQ ID NO: 103029 - RNA, 21 nt, Artificial Sequence
  LRRK2 RNA guide
gucucuaaaagcaggcaacaa

SEQ ID NO: 103030 - RNA, 21 nt, Artificial Sequence
  LRRK2 RNA guide
gugaagcucauguguuuuugu

SEQ ID NO: 103031 - RNA, 21 nt, Artificial Sequence
  LRRK2 RNA guide
gugagcaauccuccugccuca

SEQ ID NO: 103032 - RNA, 21 nt, Artificial Sequence
  LRRK2 RNA guide
gugccuggccauguguguuug

SEQ ID NO: 103033 - RNA, 21 nt, Artificial Sequence
  LRRK2 RNA guide
guggcauguaccuguaucccu

SEQ ID NO: 103034 - RNA, 21 nt, Artificial Sequence
  LRRK2 RNA guide
gugguggcauguaccuguauc

SEQ ID NO: 103035 - RNA, 21 nt, Artificial Sequence
  LRRK2 RNA guide
gugugguggcauguaccugua

SEQ ID NO: 103036 - RNA, 21 nt, Artificial Sequence
  LRRK2 RNA guide
guguguuuguuucuuucuaca

SEQ ID NO: 103037 - RNA, 21 nt, Artificial Sequence
  LRRK2 RNA guide
guguuuguuucuuucuacaaa

SEQ ID NO: 103038 - RNA, 21 nt, Artificial Sequence
  LRRK2 RNA guide
guguuuuuguugccugcuuuu

SEQ ID NO: 103039 - RNA, 21 nt, Artificial Sequence
  LRRK2 RNA guide
guuaguuuuuauaagccuggu

SEQ ID NO: 103040 - RNA, 21 nt, Artificial Sequence
  LRRK2 RNA guide
guucagguuuguagaaagaaa

SEQ ID NO: 103041 - RNA, 21 nt, Artificial Sequence
  LRRK2 RNA guide
guugccugcuuuuagagacag

SEQ ID NO: 103042 - RNA, 21 nt, Artificial Sequence
  LRRK2 RNA guide
guugcuagggauacagguaca

SEQ ID NO: 103043 - RNA, 21 nt, Artificial Sequence
  LRRK2 RNA guide
guuuagaccagccuaggcaaa

SEQ ID NO: 103044 - RNA, 21 nt, Artificial Sequence
  LRRK2 RNA guide
guuucagugagcuaugauugc

SEQ ID NO: 103045 - RNA, 21 nt, Artificial Sequence
  LRRK2 RNA guide
guuucuuucuacaaaccugaa

SEQ ID NO: 103046 - RNA, 21 nt, Artificial Sequence
  LRRK2 RNA guide
guuugcuauuuugccuaggcu

SEQ ID NO: 103047 - RNA, 21 nt, Artificial Sequence
  LRRK2 RNA guide
guuuguagaaagaaacaaaca

SEQ ID NO: 103048 - RNA, 21 nt, Artificial Sequence
  LRRK2 RNA guide
guuuguuucuuucuacaaacc

SEQ ID NO: 103049 - RNA, 21 nt, Artificial Sequence
  LRRK2 RNA guide
guuuuuauaagccugguucag

SEQ ID NO: 103050 - RNA, 21 nt, Artificial Sequence
  LRRK2 RNA guide
guuuuuguugccugcuuuuag

SEQ ID NO: 103051 - RNA, 21 nt, Artificial Sequence
  LRRK2 RNA guide
uaaaagcaggcaacaaaaaca

SEQ ID NO: 103052 - RNA, 21 nt, Artificial Sequence
  LRRK2 RNA guide
uaaacuucuggguucaaguga

SEQ ID NO: 103053 - RNA, 21 nt, Artificial Sequence
  LRRK2 RNA guide
uaagccugguucagguuugua

SEQ ID NO: 103054 - RNA, 21 nt, Artificial Sequence
  LRRK2 RNA guide
uaauucccuguagugaagcuc

SEQ ID NO: 103055 - RNA, 21 nt, Artificial Sequence
  LRRK2 RNA guide
uacaaaccugaaccaggcuua

SEQ ID NO: 103056 - RNA, 21 nt, Artificial Sequence
  LRRK2 RNA guide
uacagggaauuaaauacaaug

SEQ ID NO: 103057 - RNA, 21 nt, Artificial Sequence
  LRRK2 RNA guide
uaccuguaucccuagcaacuc

SEQ ID NO: 103058 - RNA, 21 nt, Artificial Sequence
  LRRK2 RNA guide
uacucucauuguauuuaauuc

SEQ ID NO: 103059 - RNA, 21 nt, Artificial Sequence
  LRRK2 RNA guide
uagaaagaaacaaacacacau

SEQ ID NO: 103060 - RNA, 21 nt, Artificial Sequence
  LRRK2 RNA guide
uagaccagccuaggcaaaaua

SEQ ID NO: 103061 - RNA, 21 nt, Artificial Sequence
  LRRK2 RNA guide
uagcaaacccugucucuccaa

SEQ ID NO: 103062 - RNA, 21 nt, Artificial Sequence
  LRRK2 RNA guide
uaggcaaaauagcaaacccug

SEQ ID NO: 103063 - RNA, 21 nt, Artificial Sequence
  LRRK2 RNA guide
uaggcuggucuaaacuucugg

SEQ ID NO: 103064 - RNA, 21 nt, Artificial Sequence
  LRRK2 RNA guide
uagggauacagguacaugcca

SEQ ID NO: 103065 - RNA, 21 nt, Artificial Sequence
  LRRK2 RNA guide
uagugaagcucauguguuuuu

SEQ ID NO: 103066 - RNA, 21 nt, Artificial Sequence
  LRRK2 RNA guide
uaguuuuuauaagccugguuc

SEQ ID NO: 103067 - RNA, 21 nt, Artificial Sequence
  LRRK2 RNA guide
uauaagccugguucagguuug

SEQ ID NO: 103068 - RNA, 21 nt, Artificial Sequence
  LRRK2 RNA guide
uaucccuagcaacucaggagg

SEQ ID NO: 103069 - RNA, 21 nt, Artificial Sequence
  LRRK2 RNA guide
uauuuaauucccuguagugaa

SEQ ID NO: 103070 - RNA, 21 nt, Artificial Sequence
  LRRK2 RNA guide
uauuuugccuaggcuggucua

SEQ ID NO: 103071 - RNA, 21 nt, Artificial Sequence
  LRRK2 RNA guide
ucaaacuccugggcucaagug

SEQ ID NO: 103072 - RNA, 21 nt, Artificial Sequence
  LRRK2 RNA guide
ucaagugagcaauccuccugc

SEQ ID NO: 103073 - RNA, 21 nt, Artificial Sequence
  LRRK2 RNA guide
ucacuacagggaauuaaauac

SEQ ID NO: 103074 - RNA, 21 nt, Artificial Sequence
  LRRK2 RNA guide
ucacuugaacccagaaguuua

SEQ ID NO: 103075 - RNA, 21 nt, Artificial Sequence
  LRRK2 RNA guide
ucagccuccugaguugcuagg

SEQ ID NO: 103076 - RNA, 21 nt, Artificial Sequence
  LRRK2 RNA guide
ucagguuuguagaaagaaaca

SEQ ID NO: 103077 - RNA, 21 nt, Artificial Sequence
  LRRK2 RNA guide
ucauacucaaaaguuugcuua

SEQ ID NO: 103078 - RNA, 21 nt, Artificial Sequence
  LRRK2 RNA guide
ucauguguuuuuguugccugc

SEQ ID NO: 103079 - RNA, 21 nt, Artificial Sequence
  LRRK2 RNA guide
ucauucuuuuuuggagagaca

SEQ ID NO: 103080 - RNA, 21 nt, Artificial Sequence
  LRRK2 RNA guide
ucauuguauuuaauucccugu

SEQ ID NO: 103081 - RNA, 21 nt, Artificial Sequence
  LRRK2 RNA guide
ucccuagcaacucaggaggcu

SEQ ID NO: 103082 - RNA, 21 nt, Artificial Sequence
  LRRK2 RNA guide
ucccuguagugaagcucaugu

SEQ ID NO: 103083 - RNA, 21 nt, Artificial Sequence
  LRRK2 RNA guide
ucccuguuaguuuuuauaagc

SEQ ID NO: 103084 - RNA, 21 nt, Artificial Sequence
  LRRK2 RNA guide
uccugaguugcuagggauaca

SEQ ID NO: 103085 - RNA, 21 nt, Artificial Sequence
  LRRK2 RNA guide
uccugggcucaagugagcaau

SEQ ID NO: 103086 - RNA, 21 nt, Artificial Sequence
  LRRK2 RNA guide
ucuaaaagcaggcaacaaaaa

SEQ ID NO: 103087 - RNA, 21 nt, Artificial Sequence
  LRRK2 RNA guide
ucuaaacuucuggguucaagu

SEQ ID NO: 103088 - RNA, 21 nt, Artificial Sequence
  LRRK2 RNA guide
ucuacaaaccugaaccaggcu

SEQ ID NO: 103089 - RNA, 21 nt, Artificial Sequence
  LRRK2 RNA guide
ucucauuguauuuaauucccu

SEQ ID NO: 103090 - RNA, 21 nt, Artificial Sequence
  LRRK2 RNA guide
ucucuaaaagcaggcaacaaa

SEQ ID NO: 103091 - RNA, 21 nt, Artificial Sequence
  LRRK2 RNA guide
ucuuucuacaaaccugaacca

SEQ ID NO: 103092 - RNA, 21 nt, Artificial Sequence
  LRRK2 RNA guide
ucuuuuuuggagagacagggu

SEQ ID NO: 103093 - RNA, 21 nt, Artificial Sequence
  LRRK2 RNA guide
ugaaccaggcuuauaaaaacu

SEQ ID NO: 103094 - RNA, 21 nt, Artificial Sequence
  LRRK2 RNA guide
ugaacccagaaguuuagacca

SEQ ID NO: 103095 - RNA, 21 nt, Artificial Sequence
  LRRK2 RNA guide
ugaagcucauguguuuuuguu

SEQ ID NO: 103096 - RNA, 21 nt, Artificial Sequence
  LRRK2 RNA guide
ugagaguaauaaaaaauaggu

SEQ ID NO: 103097 - RNA, 21 nt, Artificial Sequence
  LRRK2 RNA guide
ugagccaccgugccuggccau

SEQ ID NO: 103098 - RNA, 21 nt, Artificial Sequence
  LRRK2 RNA guide
ugagcuucacuacagggaauu

SEQ ID NO: 103099 - RNA, 21 nt, Artificial Sequence
  LRRK2 RNA guide
ugaggcaggaggauugcucac

SEQ ID NO: 103100 - RNA, 21 nt, Artificial Sequence
  LRRK2 RNA guide
ugaguugcuagggauacaggu

SEQ ID NO: 103101 - RNA, 21 nt, Artificial Sequence
  LRRK2 RNA guide
ugcaaauaagcaaacuuuuga

SEQ ID NO: 103102 - RNA, 21 nt, Artificial Sequence
  LRRK2 RNA guide
ugccuaggcuggucuaaacuu

SEQ ID NO: 103103 - RNA, 21 nt, Artificial Sequence
  LRRK2 RNA guide
ugccugcuuuuagagacaggg

SEQ ID NO: 103104 - RNA, 21 nt, Artificial Sequence
  LRRK2 RNA guide
ugccuggccauguguguuugu

SEQ ID NO: 103105 - RNA, 21 nt, Artificial Sequence
  LRRK2 RNA guide
ugcuagggauacagguacaug

SEQ ID NO: 103106 - RNA, 21 nt, Artificial Sequence
  LRRK2 RNA guide
ugcuauuuugccuaggcuggu

SEQ ID NO: 103107 - RNA, 21 nt, Artificial Sequence
  LRRK2 RNA guide
ugcucaccuauuuuuuauuac

SEQ ID NO: 103108 - RNA, 21 nt, Artificial Sequence
  LRRK2 RNA guide
uggagagacaggguuugcuau

SEQ ID NO: 103109 - RNA, 21 nt, Artificial Sequence
  LRRK2 RNA guide
uggcauguaccuguaucccua

SEQ ID NO: 103110 - RNA, 21 nt, Artificial Sequence
  LRRK2 RNA guide
uggccauguguguuuguuucu

SEQ ID NO: 103111 - RNA, 21 nt, Artificial Sequence
  LRRK2 RNA guide
ugggcucaagugagcaauccu

SEQ ID NO: 103112 - RNA, 21 nt, Artificial Sequence
  LRRK2 RNA guide
uggucuaaacuucuggguuca

SEQ ID NO: 103113 - RNA, 21 nt, Artificial Sequence
  LRRK2 RNA guide
uggugugguggcauguaccug

SEQ ID NO: 103114 - RNA, 21 nt, Artificial Sequence
  LRRK2 RNA guide
ugguucagguuuguagaaaga

SEQ ID NO: 103115 - RNA, 21 nt, Artificial Sequence
  LRRK2 RNA guide
uguaccuguaucccuagcaac

SEQ ID NO: 103116 - RNA, 21 nt, Artificial Sequence
  LRRK2 RNA guide
uguagaaagaaacaaacacac

SEQ ID NO: 103117 - RNA, 21 nt, Artificial Sequence
  LRRK2 RNA guide
uguagugaagcucauguguuu

SEQ ID NO: 103118 - RNA, 21 nt, Artificial Sequence
  LRRK2 RNA guide
uguaucccuagcaacucagga

SEQ ID NO: 103119 - RNA, 21 nt, Artificial Sequence
  LRRK2 RNA guide
uguauuuaauucccuguagug

SEQ ID NO: 103120 - RNA, 21 nt, Artificial Sequence
  LRRK2 RNA guide
ugucucuaaaagcaggcaaca

SEQ ID NO: 103121 - RNA, 21 nt, Artificial Sequence
  LRRK2 RNA guide
ugugguggcauguaccuguau

SEQ ID NO: 103122 - RNA, 21 nt, Artificial Sequence
  LRRK2 RNA guide
uguguguuuguuucuuucuac

SEQ ID NO: 103123 - RNA, 21 nt, Artificial Sequence
  LRRK2 RNA guide
uguguuuguuucuuucuacaa

SEQ ID NO: 103124 - RNA, 21 nt, Artificial Sequence
  LRRK2 RNA guide
uguguuuuuguugccugcuuu

SEQ ID NO: 103125 - RNA, 21 nt, Artificial Sequence
  LRRK2 RNA guide
uguuaguuuuuauaagccugg

SEQ ID NO: 103126 - RNA, 21 nt, Artificial Sequence
  LRRK2 RNA guide
uguugccugcuuuuagagaca

SEQ ID NO: 103127 - RNA, 21 nt, Artificial Sequence
  LRRK2 RNA guide
uguuucuuucuacaaaccuga

SEQ ID NO: 103128 - RNA, 21 nt, Artificial Sequence
  LRRK2 RNA guide
uguuuguuucuuucuacaaac

SEQ ID NO: 103129 - RNA, 21 nt, Artificial Sequence
  LRRK2 RNA guide
uguuuuuguugccugcuuuua

SEQ ID NO: 103130 - RNA, 21 nt, Artificial Sequence
  LRRK2 RNA guide
uuaauucccuguagugaagcu

SEQ ID NO: 103131 - RNA, 21 nt, Artificial Sequence
  LRRK2 RNA guide
uuacucucauuguauuuaauu

SEQ ID NO: 103132 - RNA, 21 nt, Artificial Sequence
  LRRK2 RNA guide
uuagaccagccuaggcaaaau

SEQ ID NO: 103133 - RNA, 21 nt, Artificial Sequence
  LRRK2 RNA guide
uuaguuuuuauaagccugguu

SEQ ID NO: 103134 - RNA, 21 nt, Artificial Sequence
  LRRK2 RNA guide
uuauaagccugguucagguuu

SEQ ID NO: 103135 - RNA, 21 nt, Artificial Sequence
  LRRK2 RNA guide
uucacuacagggaauuaaaua

SEQ ID NO: 103136 - RNA, 21 nt, Artificial Sequence
  LRRK2 RNA guide
uucagguuuguagaaagaaac

SEQ ID NO: 103137 - RNA, 21 nt, Artificial Sequence
  LRRK2 RNA guide
uucauucuuuuuuggagagac

SEQ ID NO: 103138 - RNA, 21 nt, Artificial Sequence
  LRRK2 RNA guide
uucccuguagugaagcucaug

SEQ ID NO: 103139 - RNA, 21 nt, Artificial Sequence
  LRRK2 RNA guide
uucccuguuaguuuuuauaag

SEQ ID NO: 103140 - RNA, 21 nt, Artificial Sequence
  LRRK2 RNA guide
uucuacaaaccugaaccaggc

SEQ ID NO: 103141 - RNA, 21 nt, Artificial Sequence
  LRRK2 RNA guide
uucuuucuacaaaccugaacc

SEQ ID NO: 103142 - RNA, 21 nt, Artificial Sequence
  LRRK2 RNA guide
uucuuuuuuggagagacaggg

SEQ ID NO: 103143 - RNA, 21 nt, Artificial Sequence
  LRRK2 RNA guide
uugaacccagaaguuuagacc

SEQ ID NO: 103144 - RNA, 21 nt, Artificial Sequence
  LRRK2 RNA guide
uugccuaggcuggucuaaacu

SEQ ID NO: 103145 - RNA, 21 nt, Artificial Sequence
  LRRK2 RNA guide
uugccugcuuuuagagacagg

SEQ ID NO: 103146 - RNA, 21 nt, Artificial Sequence
  LRRK2 RNA guide
uugcuagggauacagguacau

SEQ ID NO: 103147 - RNA, 21 nt, Artificial Sequence
  LRRK2 RNA guide
uugcuauuuugccuaggcugg

SEQ ID NO: 103148 - RNA, 21 nt, Artificial Sequence
  LRRK2 RNA guide
uugcucaccuauuuuuuauua

SEQ ID NO: 103149 - RNA, 21 nt, Artificial Sequence
  LRRK2 RNA guide
uugcucacuugagcccaggag

SEQ ID NO: 103150 - RNA, 21 nt, Artificial Sequence
  LRRK2 RNA guide
uuggagagacaggguuugcua

SEQ ID NO: 103151 - RNA, 21 nt, Artificial Sequence
  LRRK2 RNA guide
uuguagaaagaaacaaacaca

SEQ ID NO: 103152 - RNA, 21 nt, Artificial Sequence
  LRRK2 RNA guide
uuguauuuaauucccuguagu

SEQ ID NO: 103153 - RNA, 21 nt, Artificial Sequence
  LRRK2 RNA guide
uuguugccugcuuuuagagac

SEQ ID NO: 103154 - RNA, 21 nt, Artificial Sequence
  LRRK2 RNA guide
uuguuucuuucuacaaaccug

SEQ ID NO: 103155 - RNA, 21 nt, Artificial Sequence
  LRRK2 RNA guide
uuuaauucccuguagugaagc

SEQ ID NO: 103156 - RNA, 21 nt, Artificial Sequence
  LRRK2 RNA guide
uuuagaccagccuaggcaaaa

SEQ ID NO: 103157 - RNA, 21 nt, Artificial Sequence
  LRRK2 RNA guide
uuuauaagccugguucagguu

SEQ ID NO: 103158 - RNA, 21 nt, Artificial Sequence
  LRRK2 RNA guide
uuucagugagcuaugauugca

SEQ ID NO: 103159 - RNA, 21 nt, Artificial Sequence
  LRRK2 RNA guide
uuucauucuuuuuuggagaga

SEQ ID NO: 103160 - RNA, 21 nt, Artificial Sequence
  LRRK2 RNA guide
uuucuacaaaccugaaccagg

SEQ ID NO: 103161 - RNA, 21 nt, Artificial Sequence
  LRRK2 RNA guide
uuucuuucuacaaaccugaac

SEQ ID NO: 103162 - RNA, 21 nt, Artificial Sequence
  LRRK2 RNA guide
uuugccuaggcuggucuaaac

SEQ ID NO: 103163 - RNA, 21 nt, Artificial Sequence
  LRRK2 RNA guide
uuugcuauuuugccuaggcug

SEQ ID NO: 103164 - RNA, 21 nt, Artificial Sequence
  LRRK2 RNA guide
uuuggagagacaggguuugcu

SEQ ID NO: 103165 - RNA, 21 nt, Artificial Sequence
  LRRK2 RNA guide
uuuguagaaagaaacaaacac

SEQ ID NO: 103166 - RNA, 21 nt, Artificial Sequence
  LRRK2 RNA guide
uuuguugccugcuuuuagaga

SEQ ID NO: 103167 - RNA, 21 nt, Artificial Sequence
  LRRK2 RNA guide
uuuguuucuuucuacaaaccu

SEQ ID NO: 103168 - RNA, 21 nt, Artificial Sequence
  LRRK2 RNA guide
uuuuauaagccugguucaggu

SEQ ID NO: 103169 - RNA, 21 nt, Artificial Sequence
  LRRK2 RNA guide
uuuucauucuuuuuuggagag

SEQ ID NO: 103170 - RNA, 21 nt, Artificial Sequence
  LRRK2 RNA guide
uuuugccuaggcuggucuaaa

SEQ ID NO: 103171 - RNA, 21 nt, Artificial Sequence
  LRRK2 RNA guide
uuuuggagagacaggguuugc

SEQ ID NO: 103172 - RNA, 21 nt, Artificial Sequence
  LRRK2 RNA guide
uuuuguugccugcuuuuagag

SEQ ID NO: 103173 - RNA, 21 nt, Artificial Sequence
  LRRK2 RNA guide
uuuuuauaagccugguucagg

SEQ ID NO: 103174 - RNA, 21 nt, Artificial Sequence
  LRRK2 RNA guide
uuuuucauucuuuuuuggaga

SEQ ID NO: 103175 - RNA, 21 nt, Artificial Sequence
  LRRK2 RNA guide
uuuuuggagagacaggguuug

SEQ ID NO: 103176 - RNA, 21 nt, Artificial Sequence
  LRRK2 RNA guide
uuuuuguugccugcuuuuaga

SEQ ID NO: 103177 - RNA, 21 nt, Artificial Sequence
  LRRK2 RNA guide
uuuuuuggagagacaggguuu

SEQ ID NO: 103178 - RNA, 22 nt, Artificial Sequence
  LRRK2 RNA guide
aaaaacacaugagcuucacuac

SEQ ID NO: 103179 - RNA, 22 nt, Artificial Sequence
  LRRK2 RNA guide
aaaacacaugagcuucacuaca

SEQ ID NO: 103180 - RNA, 22 nt, Artificial Sequence
  LRRK2 RNA guide
aaaagcaggcaacaaaaacaca

SEQ ID NO: 103181 - RNA, 22 nt, Artificial Sequence
  LRRK2 RNA guide
aaaauagcaaacccugucucuc

SEQ ID NO: 103182 - RNA, 22 nt, Artificial Sequence
  LRRK2 RNA guide
aaacaaacacacauggccaggc

SEQ ID NO: 103183 - RNA, 22 nt, Artificial Sequence
  LRRK2 RNA guide
aaacacacauggccaggcacgg

SEQ ID NO: 103184 - RNA, 22 nt, Artificial Sequence
  LRRK2 RNA guide
aaacacaugagcuucacuacag

SEQ ID NO: 103185 - RNA, 22 nt, Artificial Sequence
  LRRK2 RNA guide
aaacccugucucuccaaaaaag

SEQ ID NO: 103186 - RNA, 22 nt, Artificial Sequence
  LRRK2 RNA guide
aaaccugaaccaggcuuauaaa

SEQ ID NO: 103187 - RNA, 22 nt, Artificial Sequence
  LRRK2 RNA guide
aaacuccugggcucaagugagc

SEQ ID NO: 103188 - RNA, 22 nt, Artificial Sequence
  LRRK2 RNA guide
aaagaaacaaacacacauggcc

SEQ ID NO: 103189 - RNA, 22 nt, Artificial Sequence
  LRRK2 RNA guide
aaagaaugaaaaaauuagccug

SEQ ID NO: 103190 - RNA, 22 nt, Artificial Sequence
  LRRK2 RNA guide
aaagcaggcaacaaaaacacau

SEQ ID NO: 103191 - RNA, 22 nt, Artificial Sequence
  LRRK2 RNA guide
aaauagcaaacccugucucucc

SEQ ID NO: 103192 - RNA, 22 nt, Artificial Sequence
  LRRK2 RNA guide
aacaaaaacacaugagcuucac

SEQ ID NO: 103193 - RNA, 22 nt, Artificial Sequence
  LRRK2 RNA guide
aacaaacacacauggccaggca

SEQ ID NO: 103194 - RNA, 22 nt, Artificial Sequence
  LRRK2 RNA guide
aacacacauggccaggcacggu

SEQ ID NO: 103195 - RNA, 22 nt, Artificial Sequence
  LRRK2 RNA guide
aacacaugagcuucacuacagg

SEQ ID NO: 103196 - RNA, 22 nt, Artificial Sequence
  LRRK2 RNA guide
aacauucccuguuaguuuuuau

SEQ ID NO: 103197 - RNA, 22 nt, Artificial Sequence
  LRRK2 RNA guide
aaccaggcuuauaaaaacuaac

SEQ ID NO: 103198 - RNA, 22 nt, Artificial Sequence
  LRRK2 RNA guide
aacccagaaguuuagaccagcc

SEQ ID NO: 103199 - RNA, 22 nt, Artificial Sequence
  LRRK2 RNA guide
aacccugucucuccaaaaaaga

SEQ ID NO: 103200 - RNA, 22 nt, Artificial Sequence
  LRRK2 RNA guide
aaccugaaccaggcuuauaaaa

SEQ ID NO: 103201 - RNA, 22 nt, Artificial Sequence
  LRRK2 RNA guide
aacuccugggcucaagugagca

SEQ ID NO: 103202 - RNA, 22 nt, Artificial Sequence
  LRRK2 RNA guide
aagaaacaaacacacauggcca

SEQ ID NO: 103203 - RNA, 22 nt, Artificial Sequence
  LRRK2 RNA guide
aagaaugaaaaaauuagccugg

SEQ ID NO: 103204 - RNA, 22 nt, Artificial Sequence
  LRRK2 RNA guide
aagacccugucucuaaaagcag

SEQ ID NO: 103205 - RNA, 22 nt, Artificial Sequence
  LRRK2 RNA guide
aagcaggcaacaaaaacacaug

SEQ ID NO: 103206 - RNA, 22 nt, Artificial Sequence
  LRRK2 RNA guide
aagccugguucagguuuguaga

SEQ ID NO: 103207 - RNA, 22 nt, Artificial Sequence
  LRRK2 RNA guide
aagcucauguguuuuuguugcc

SEQ ID NO: 103208 - RNA, 22 nt, Artificial Sequence
  LRRK2 RNA guide
aagugagcaauccuccugccuc

SEQ ID NO: 103209 - RNA, 22 nt, Artificial Sequence
  LRRK2 RNA guide
aaguuuagaccagccuaggcaa

SEQ ID NO: 103210 - RNA, 22 nt, Artificial Sequence
  LRRK2 RNA guide
aauagcaaacccugucucucca

SEQ ID NO: 103211 - RNA, 22 nt, Artificial Sequence
  LRRK2 RNA guide
aauggugcaaucauagcucacu

SEQ ID NO: 103212 - RNA, 22 nt, Artificial Sequence
  LRRK2 RNA guide
aauucccuguagugaagcucau

SEQ ID NO: 103213 - RNA, 22 nt, Artificial Sequence
  LRRK2 RNA guide
acaaaaacacaugagcuucacu

SEQ ID NO: 103214 - RNA, 22 nt, Artificial Sequence
  LRRK2 RNA guide
acaaacacacauggccaggcac

SEQ ID NO: 103215 - RNA, 22 nt, Artificial Sequence
  LRRK2 RNA guide
acaaaccugaaccaggcuuaua

SEQ ID NO: 103216 - RNA, 22 nt, Artificial Sequence
  LRRK2 RNA guide
acacacauggccaggcacggug

SEQ ID NO: 103217 - RNA, 22 nt, Artificial Sequence
  LRRK2 RNA guide
acacagcaagacccugucucua

SEQ ID NO: 103218 - RNA, 22 nt, Artificial Sequence
  LRRK2 RNA guide
acacaugagcuucacuacaggg

SEQ ID NO: 103219 - RNA, 22 nt, Artificial Sequence
  LRRK2 RNA guide
acacauggccaggcacgguggc

SEQ ID NO: 103220 - RNA, 22 nt, Artificial Sequence
  LRRK2 RNA guide
acagcaagacccugucucuaaa

SEQ ID NO: 103221 - RNA, 22 nt, Artificial Sequence
  LRRK2 RNA guide
acaggguuugcuauuuugccua

SEQ ID NO: 103222 - RNA, 22 nt, Artificial Sequence
  LRRK2 RNA guide
acaugagcuucacuacagggaa

SEQ ID NO: 103223 - RNA, 22 nt, Artificial Sequence
  LRRK2 RNA guide
acauucccuguuaguuuuuaua

SEQ ID NO: 103224 - RNA, 22 nt, Artificial Sequence
  LRRK2 RNA guide
accacaccaggcuaauuuuuuc

SEQ ID NO: 103225 - RNA, 22 nt, Artificial Sequence
  LRRK2 RNA guide
accagccuaggcaaaauagcaa

SEQ ID NO: 103226 - RNA, 22 nt, Artificial Sequence
  LRRK2 RNA guide
accaggcuuauaaaaacuaaca

SEQ ID NO: 103227 - RNA, 22 nt, Artificial Sequence
  LRRK2 RNA guide
acccagaaguuuagaccagccu

SEQ ID NO: 103228 - RNA, 22 nt, Artificial Sequence
  LRRK2 RNA guide
acccugucucuaaaagcaggca

SEQ ID NO: 103229 - RNA, 22 nt, Artificial Sequence
  LRRK2 RNA guide
acccugucucuccaaaaaagaa

SEQ ID NO: 103230 - RNA, 22 nt, Artificial Sequence
  LRRK2 RNA guide
accgugccuggccauguguguu

SEQ ID NO: 103231 - RNA, 22 nt, Artificial Sequence
  LRRK2 RNA guide
accugaaccaggcuuauaaaaa

SEQ ID NO: 103232 - RNA, 22 nt, Artificial Sequence
  LRRK2 RNA guide
accuguaucccuagcaacucag

SEQ ID NO: 103233 - RNA, 22 nt, Artificial Sequence
  LRRK2 RNA guide
acuacagggaauuaaauacaau

SEQ ID NO: 103234 - RNA, 22 nt, Artificial Sequence
  LRRK2 RNA guide
acuccugggcucaagugagcaa

SEQ ID NO: 103235 - RNA, 22 nt, Artificial Sequence
  LRRK2 RNA guide
acucucauuguauuuaauuccc

SEQ ID NO: 103236 - RNA, 22 nt, Artificial Sequence
  LRRK2 RNA guide
acuugaacccagaaguuuagac

SEQ ID NO: 103237 - RNA, 22 nt, Artificial Sequence
  LRRK2 RNA guide
agaaacaaacacacauggccag

SEQ ID NO: 103238 - RNA, 22 nt, Artificial Sequence
  LRRK2 RNA guide
agaaagaaacaaacacacaugg

SEQ ID NO: 103239 - RNA, 22 nt, Artificial Sequence
  LRRK2 RNA guide
agaaguuuagaccagccuaggc

SEQ ID NO: 103240 - RNA, 22 nt, Artificial Sequence
  LRRK2 RNA guide
agaaugaaaaaauuagccuggu

SEQ ID NO: 103241 - RNA, 22 nt, Artificial Sequence
  LRRK2 RNA guide
agacaggguuugcuauuuugcc

SEQ ID NO: 103242 - RNA, 22 nt, Artificial Sequence
  LRRK2 RNA guide
agaccagccuaggcaaaauagc

SEQ ID NO: 103243 - RNA, 22 nt, Artificial Sequence
  LRRK2 RNA guide
agacccugucucuaaaagcagg

SEQ ID NO: 103244 - RNA, 22 nt, Artificial Sequence
  LRRK2 RNA guide
agagacaggguuugcuauuuug

SEQ ID NO: 103245 - RNA, 22 nt, Artificial Sequence
  LRRK2 RNA guide
agcaaacccugucucuccaaaa

SEQ ID NO: 103246 - RNA, 22 nt, Artificial Sequence
  LRRK2 RNA guide
agcaagacccugucucuaaaag

SEQ ID NO: 103247 - RNA, 22 nt, Artificial Sequence
  LRRK2 RNA guide
agcaggcaacaaaaacacauga

SEQ ID NO: 103248 - RNA, 22 nt, Artificial Sequence
  LRRK2 RNA guide
agccaccgugccuggccaugug

SEQ ID NO: 103249 - RNA, 22 nt, Artificial Sequence
  LRRK2 RNA guide
agccuaggcaaaauagcaaacc

SEQ ID NO: 103250 - RNA, 22 nt, Artificial Sequence
  LRRK2 RNA guide
agccuccugaguugcuagggau

SEQ ID NO: 103251 - RNA, 22 nt, Artificial Sequence
  LRRK2 RNA guide
agccugguucagguuuguagaa

SEQ ID NO: 103252 - RNA, 22 nt, Artificial Sequence
  LRRK2 RNA guide
agcucauguguuuuuguugccu

SEQ ID NO: 103253 - RNA, 22 nt, Artificial Sequence
  LRRK2 RNA guide
agcuucacuacagggaauuaaa

SEQ ID NO: 103254 - RNA, 22 nt, Artificial Sequence
  LRRK2 RNA guide
aggaggauugcucacuugagcc

SEQ ID NO: 103255 - RNA, 22 nt, Artificial Sequence
  LRRK2 RNA guide
aggaucacuugaacccagaagu

SEQ ID NO: 103256 - RNA, 22 nt, Artificial Sequence
  LRRK2 RNA guide
aggauugcucacuugagcccag

SEQ ID NO: 103257 - RNA, 22 nt, Artificial Sequence
  LRRK2 RNA guide
aggcaaaauagcaaacccuguc

SEQ ID NO: 103258 - RNA, 22 nt, Artificial Sequence
  LRRK2 RNA guide
aggcaacaaaaacacaugagcu

SEQ ID NO: 103259 - RNA, 22 nt, Artificial Sequence
  LRRK2 RNA guide
aggcaggaggauugcucacuug

SEQ ID NO: 103260 - RNA, 22 nt, Artificial Sequence
  LRRK2 RNA guide
aggcugaggcaggaggauugcu

SEQ ID NO: 103261 - RNA, 22 nt, Artificial Sequence
  LRRK2 RNA guide
aggcuggucuaaacuucugggu

SEQ ID NO: 103262 - RNA, 22 nt, Artificial Sequence
  LRRK2 RNA guide
aggcuuauaaaaacuaacaggg

SEQ ID NO: 103263 - RNA, 22 nt, Artificial Sequence
  LRRK2 RNA guide
agggauacagguacaugccacc

SEQ ID NO: 103264 - RNA, 22 nt, Artificial Sequence
  LRRK2 RNA guide
aggguuugcuauuuugccuagg

SEQ ID NO: 103265 - RNA, 22 nt, Artificial Sequence
  LRRK2 RNA guide
agguuuguagaaagaaacaaac

SEQ ID NO: 103266 - RNA, 22 nt, Artificial Sequence
  LRRK2 RNA guide
agugaagcucauguguuuuugu

SEQ ID NO: 103267 - RNA, 22 nt, Artificial Sequence
  LRRK2 RNA guide
agugagcaauccuccugccuca

SEQ ID NO: 103268 - RNA, 22 nt, Artificial Sequence
  LRRK2 RNA guide
aguugcuagggauacagguaca

SEQ ID NO: 103269 - RNA, 22 nt, Artificial Sequence
  LRRK2 RNA guide
aguuuagaccagccuaggcaaa

SEQ ID NO: 103270 - RNA, 22 nt, Artificial Sequence
  LRRK2 RNA guide
aguuuuuauaagccugguucag

SEQ ID NO: 103271 - RNA, 22 nt, Artificial Sequence
  LRRK2 RNA guide
auaagccugguucagguuugua

SEQ ID NO: 103272 - RNA, 22 nt, Artificial Sequence
  LRRK2 RNA guide
auacagguacaugccaccacac

SEQ ID NO: 103273 - RNA, 22 nt, Artificial Sequence
  LRRK2 RNA guide
auagcaaacccugucucuccaa

SEQ ID NO: 103274 - RNA, 22 nt, Artificial Sequence
  LRRK2 RNA guide
aucacuugaacccagaaguuua

SEQ ID NO: 103275 - RNA, 22 nt, Artificial Sequence
  LRRK2 RNA guide
aucccuagcaacucaggaggcu

SEQ ID NO: 103276 - RNA, 22 nt, Artificial Sequence
  LRRK2 RNA guide
augagcuucacuacagggaauu

SEQ ID NO: 103277 - RNA, 22 nt, Artificial Sequence
  LRRK2 RNA guide
auggugcaaucauagcucacug

SEQ ID NO: 103278 - RNA, 22 nt, Artificial Sequence
  LRRK2 RNA guide
auguaccuguaucccuagcaac

SEQ ID NO: 103279 - RNA, 22 nt, Artificial Sequence
  LRRK2 RNA guide
auguguguuuguuucuuucuac

SEQ ID NO: 103280 - RNA, 22 nt, Artificial Sequence
  LRRK2 RNA guide
auguguuuuuguugccugcuuu

SEQ ID NO: 103281 - RNA, 22 nt, Artificial Sequence
  LRRK2 RNA guide
auucccuguagugaagcucaug

SEQ ID NO: 103282 - RNA, 22 nt, Artificial Sequence
  LRRK2 RNA guide
auucccuguuaguuuuuauaag

SEQ ID NO: 103283 - RNA, 22 nt, Artificial Sequence
  LRRK2 RNA guide
auucuuuuuuggagagacaggg

SEQ ID NO: 103284 - RNA, 22 nt, Artificial Sequence
  LRRK2 RNA guide
auugcucacuugagcccaggag

SEQ ID NO: 103285 - RNA, 22 nt, Artificial Sequence
  LRRK2 RNA guide
auuguauuuaauucccuguagu

SEQ ID NO: 103286 - RNA, 22 nt, Artificial Sequence
  LRRK2 RNA guide
auuuaauucccuguagugaagc

SEQ ID NO: 103287 - RNA, 22 nt, Artificial Sequence
  LRRK2 RNA guide
auuuugccuaggcuggucuaaa

SEQ ID NO: 103288 - RNA, 22 nt, Artificial Sequence
  LRRK2 RNA guide
caaaaacacaugagcuucacua

SEQ ID NO: 103289 - RNA, 22 nt, Artificial Sequence
  LRRK2 RNA guide
caaaauagcaaacccugucucu

SEQ ID NO: 103290 - RNA, 22 nt, Artificial Sequence
  LRRK2 RNA guide
caaacacacauggccaggcacg

SEQ ID NO: 103291 - RNA, 22 nt, Artificial Sequence
  LRRK2 RNA guide
caaacccugucucuccaaaaaa

SEQ ID NO: 103292 - RNA, 22 nt, Artificial Sequence
  LRRK2 RNA guide
caaaccugaaccaggcuuauaa

SEQ ID NO: 103293 - RNA, 22 nt, Artificial Sequence
  LRRK2 RNA guide
caaacuccugggcucaagugag

SEQ ID NO: 103294 - RNA, 22 nt, Artificial Sequence
  LRRK2 RNA guide
caacaaaaacacaugagcuuca

SEQ ID NO: 103295 - RNA, 22 nt, Artificial Sequence
  LRRK2 RNA guide
caagacccugucucuaaaagca

SEQ ID NO: 103296 - RNA, 22 nt, Artificial Sequence
  LRRK2 RNA guide
caagugagcaauccuccugccu

SEQ ID NO: 103297 - RNA, 22 nt, Artificial Sequence
  LRRK2 RNA guide
caauggugcaaucauagcucac

SEQ ID NO: 103298 - RNA, 22 nt, Artificial Sequence
  LRRK2 RNA guide
cacacauggccaggcacggugg

SEQ ID NO: 103299 - RNA, 22 nt, Artificial Sequence
  LRRK2 RNA guide
cacaccaggcuaauuuuuucau

SEQ ID NO: 103300 - RNA, 22 nt, Artificial Sequence
  LRRK2 RNA guide
cacagcaagacccugucucuaa

SEQ ID NO: 103301 - RNA, 22 nt, Artificial Sequence
  LRRK2 RNA guide
cacaugagcuucacuacaggga

SEQ ID NO: 103302 - RNA, 22 nt, Artificial Sequence
  LRRK2 RNA guide
caccacaccaggcuaauuuuuu

SEQ ID NO: 103303 - RNA, 22 nt, Artificial Sequence
  LRRK2 RNA guide
caccgugccuggccaugugugu

SEQ ID NO: 103304 - RNA, 22 nt, Artificial Sequence
  LRRK2 RNA guide
cacuacagggaauuaaauacaa

SEQ ID NO: 103305 - RNA, 22 nt, Artificial Sequence
  LRRK2 RNA guide
cacuugaacccagaaguuuaga

SEQ ID NO: 103306 - RNA, 22 nt, Artificial Sequence
  LRRK2 RNA guide
cagaaguuuagaccagccuagg

SEQ ID NO: 103307 - RNA, 22 nt, Artificial Sequence
  LRRK2 RNA guide
cagcaagacccugucucuaaaa

SEQ ID NO: 103308 - RNA, 22 nt, Artificial Sequence
  LRRK2 RNA guide
cagccuaggcaaaauagcaaac

SEQ ID NO: 103309 - RNA, 22 nt, Artificial Sequence
  LRRK2 RNA guide
cagccuccugaguugcuaggga

SEQ ID NO: 103310 - RNA, 22 nt, Artificial Sequence
  LRRK2 RNA guide
caggaggauugcucacuugagc

SEQ ID NO: 103311 - RNA, 22 nt, Artificial Sequence
  LRRK2 RNA guide
caggcaacaaaaacacaugagc

SEQ ID NO: 103312 - RNA, 22 nt, Artificial Sequence
  LRRK2 RNA guide
caggcuuauaaaaacuaacagg

SEQ ID NO: 103313 - RNA, 22 nt, Artificial Sequence
  LRRK2 RNA guide
caggguuugcuauuuugccuag

SEQ ID NO: 103314 - RNA, 22 nt, Artificial Sequence
  LRRK2 RNA guide
cagguuuguagaaagaaacaaa

SEQ ID NO: 103315 - RNA, 22 nt, Artificial Sequence
  LRRK2 RNA guide
caugagcuucacuacagggaau

SEQ ID NO: 103316 - RNA, 22 nt, Artificial Sequence
  LRRK2 RNA guide
cauguaccuguaucccuagcaa

SEQ ID NO: 103317 - RNA, 22 nt, Artificial Sequence
  LRRK2 RNA guide
cauguguguuuguuucuuucua

SEQ ID NO: 103318 - RNA, 22 nt, Artificial Sequence
  LRRK2 RNA guide
cauguguuuuuguugccugcuu

SEQ ID NO: 103319 - RNA, 22 nt, Artificial Sequence
  LRRK2 RNA guide
cauucccuguuaguuuuuauaa

SEQ ID NO: 103320 - RNA, 22 nt, Artificial Sequence
  LRRK2 RNA guide
cauucuuuuuuggagagacagg

SEQ ID NO: 103321 - RNA, 22 nt, Artificial Sequence
  LRRK2 RNA guide
cauuguauuuaauucccuguag

SEQ ID NO: 103322 - RNA, 22 nt, Artificial Sequence
  LRRK2 RNA guide
ccacaccaggcuaauuuuuuca

SEQ ID NO: 103323 - RNA, 22 nt, Artificial Sequence
  LRRK2 RNA guide
ccaccgugccuggccaugugug

SEQ ID NO: 103324 - RNA, 22 nt, Artificial Sequence
  LRRK2 RNA guide
ccagaaguuuagaccagccuag

SEQ ID NO: 103325 - RNA, 22 nt, Artificial Sequence
  LRRK2 RNA guide
ccagccuaggcaaaauagcaaa

SEQ ID NO: 103326 - RNA, 22 nt, Artificial Sequence
  LRRK2 RNA guide
ccaggcuuauaaaaacuaacag

SEQ ID NO: 103327 - RNA, 22 nt, Artificial Sequence
  LRRK2 RNA guide
ccauguguguuuguuucuuucu

SEQ ID NO: 103328 - RNA, 22 nt, Artificial Sequence
  LRRK2 RNA guide
cccagaaguuuagaccagccua

SEQ ID NO: 103329 - RNA, 22 nt, Artificial Sequence
  LRRK2 RNA guide
cccuguagugaagcucaugugu

SEQ ID NO: 103330 - RNA, 22 nt, Artificial Sequence
  LRRK2 RNA guide
cccugucucuaaaagcaggcaa

SEQ ID NO: 103331 - RNA, 22 nt, Artificial Sequence
  LRRK2 RNA guide
cccugucucuccaaaaaagaau

SEQ ID NO: 103332 - RNA, 22 nt, Artificial Sequence
  LRRK2 RNA guide
cccuguuaguuuuuauaagccu

SEQ ID NO: 103333 - RNA, 22 nt, Artificial Sequence
  LRRK2 RNA guide
ccgugccuggccauguguguuu

SEQ ID NO: 103334 - RNA, 22 nt, Artificial Sequence
  LRRK2 RNA guide
ccuaggcaaaauagcaaacccu

SEQ ID NO: 103335 - RNA, 22 nt, Artificial Sequence
  LRRK2 RNA guide
ccuaggcuggucuaaacuucug

SEQ ID NO: 103336 - RNA, 22 nt, Artificial Sequence
  LRRK2 RNA guide
ccucagccuccugaguugcuag

SEQ ID NO: 103337 - RNA, 22 nt, Artificial Sequence
  LRRK2 RNA guide
ccuccugaguugcuagggauac

SEQ ID NO: 103338 - RNA, 22 nt, Artificial Sequence
  LRRK2 RNA guide
ccugaaccaggcuuauaaaaac

SEQ ID NO: 103339 - RNA, 22 nt, Artificial Sequence
  LRRK2 RNA guide
ccugaguugcuagggauacagg

SEQ ID NO: 103340 - RNA, 22 nt, Artificial Sequence
  LRRK2 RNA guide
ccugcuuuuagagacagggucu

SEQ ID NO: 103341 - RNA, 22 nt, Artificial Sequence
  LRRK2 RNA guide
ccuggccauguguguuuguuuc

SEQ ID NO: 103342 - RNA, 22 nt, Artificial Sequence
  LRRK2 RNA guide
ccugggcucaagugagcaaucc

SEQ ID NO: 103343 - RNA, 22 nt, Artificial Sequence
  LRRK2 RNA guide
ccuggugugguggcauguaccu

SEQ ID NO: 103344 - RNA, 22 nt, Artificial Sequence
  LRRK2 RNA guide
ccugguucagguuuguagaaag

SEQ ID NO: 103345 - RNA, 22 nt, Artificial Sequence
  LRRK2 RNA guide
ccuguagugaagcucauguguu

SEQ ID NO: 103346 - RNA, 22 nt, Artificial Sequence
  LRRK2 RNA guide
ccuguaucccuagcaacucagg

SEQ ID NO: 103347 - RNA, 22 nt, Artificial Sequence
  LRRK2 RNA guide
ccugucucuaaaagcaggcaac

SEQ ID NO: 103348 - RNA, 22 nt, Artificial Sequence
  LRRK2 RNA guide
ccugucucuccaaaaaagaaug

SEQ ID NO: 103349 - RNA, 22 nt, Artificial Sequence
  LRRK2 RNA guide
ccuguuaguuuuuauaagccug

SEQ ID NO: 103350 - RNA, 22 nt, Artificial Sequence
  LRRK2 RNA guide
cgugccuggccauguguguuug

SEQ ID NO: 103351 - RNA, 22 nt, Artificial Sequence
  LRRK2 RNA guide
cuaaaagcaggcaacaaaaaca

SEQ ID NO: 103352 - RNA, 22 nt, Artificial Sequence
  LRRK2 RNA guide
cuaaacuucuggguucaaguga

SEQ ID NO: 103353 - RNA, 22 nt, Artificial Sequence
  LRRK2 RNA guide
cuacaaaccugaaccaggcuua

SEQ ID NO: 103354 - RNA, 22 nt, Artificial Sequence
  LRRK2 RNA guide
cuacagggaauuaaauacaaug

SEQ ID NO: 103355 - RNA, 22 nt, Artificial Sequence
  LRRK2 RNA guide
cuaggcaaaauagcaaacccug

SEQ ID NO: 103356 - RNA, 22 nt, Artificial Sequence
  LRRK2 RNA guide
cuaggcuggucuaaacuucugg

SEQ ID NO: 103357 - RNA, 22 nt, Artificial Sequence
  LRRK2 RNA guide
cuagggauacagguacaugcca

SEQ ID NO: 103358 - RNA, 22 nt, Artificial Sequence
  LRRK2 RNA guide
cuauuuugccuaggcuggucua

SEQ ID NO: 103359 - RNA, 22 nt, Artificial Sequence
  LRRK2 RNA guide
cucaaacuccugggcucaagug

SEQ ID NO: 103360 - RNA, 22 nt, Artificial Sequence
  LRRK2 RNA guide
cucaagugagcaauccuccugc

SEQ ID NO: 103361 - RNA, 22 nt, Artificial Sequence
  LRRK2 RNA guide
cucagccuccugaguugcuagg

SEQ ID NO: 103362 - RNA, 22 nt, Artificial Sequence
  LRRK2 RNA guide
cucauguguuuuuguugccugc

SEQ ID NO: 103363 - RNA, 22 nt, Artificial Sequence
  LRRK2 RNA guide
cucauuguauuuaauucccugu

SEQ ID NO: 103364 - RNA, 22 nt, Artificial Sequence
  LRRK2 RNA guide
cuccugaguugcuagggauaca

SEQ ID NO: 103365 - RNA, 22 nt, Artificial Sequence
  LRRK2 RNA guide
cuccugggcucaagugagcaau

SEQ ID NO: 103366 - RNA, 22 nt, Artificial Sequence
  LRRK2 RNA guide
cucuaaaagcaggcaacaaaaa

SEQ ID NO: 103367 - RNA, 22 nt, Artificial Sequence
  LRRK2 RNA guide
cucucauuguauuuaauucccu

SEQ ID NO: 103368 - RNA, 22 nt, Artificial Sequence
  LRRK2 RNA guide
cugaaccaggcuuauaaaaacu

SEQ ID NO: 103369 - RNA, 22 nt, Artificial Sequence
  LRRK2 RNA guide
cugaggcaggaggauugcucac

SEQ ID NO: 103370 - RNA, 22 nt, Artificial Sequence
  LRRK2 RNA guide
cugaguugcuagggauacaggu

SEQ ID NO: 103371 - RNA, 22 nt, Artificial Sequence
  LRRK2 RNA guide
cugcuuuuagagacagggucuu

SEQ ID NO: 103372 - RNA, 22 nt, Artificial Sequence
  LRRK2 RNA guide
cuggccauguguguuuguuucu

SEQ ID NO: 103373 - RNA, 22 nt, Artificial Sequence
  LRRK2 RNA guide
cugggcucaagugagcaauccu

SEQ ID NO: 103374 - RNA, 22 nt, Artificial Sequence
  LRRK2 RNA guide
cuggucuaaacuucuggguuca

SEQ ID NO: 103375 - RNA, 22 nt, Artificial Sequence
  LRRK2 RNA guide
cuggugugguggcauguaccug

SEQ ID NO: 103376 - RNA, 22 nt, Artificial Sequence
  LRRK2 RNA guide
cugguucagguuuguagaaaga

SEQ ID NO: 103377 - RNA, 22 nt, Artificial Sequence
  LRRK2 RNA guide
cuguagugaagcucauguguuu

SEQ ID NO: 103378 - RNA, 22 nt, Artificial Sequence
  LRRK2 RNA guide
cuguaucccuagcaacucagga

SEQ ID NO: 103379 - RNA, 22 nt, Artificial Sequence
  LRRK2 RNA guide
cugucucuaaaagcaggcaaca

SEQ ID NO: 103380 - RNA, 22 nt, Artificial Sequence
  LRRK2 RNA guide
cuguuaguuuuuauaagccugg

SEQ ID NO: 103381 - RNA, 22 nt, Artificial Sequence
  LRRK2 RNA guide
cuucacuacagggaauuaaaua

SEQ ID NO: 103382 - RNA, 22 nt, Artificial Sequence
  LRRK2 RNA guide
cuugaacccagaaguuuagacc

SEQ ID NO: 103383 - RNA, 22 nt, Artificial Sequence
  LRRK2 RNA guide
cuuucuacaaaccugaaccagg

SEQ ID NO: 103384 - RNA, 22 nt, Artificial Sequence
  LRRK2 RNA guide
cuuuuuuggagagacaggguuu

SEQ ID NO: 103385 - RNA, 22 nt, Artificial Sequence
  LRRK2 RNA guide
gaaacaaacacacauggccagg

SEQ ID NO: 103386 - RNA, 22 nt, Artificial Sequence
  LRRK2 RNA guide
gaaagaaacaaacacacauggc

SEQ ID NO: 103387 - RNA, 22 nt, Artificial Sequence
  LRRK2 RNA guide
gaaccaggcuuauaaaaacuaa

SEQ ID NO: 103388 - RNA, 22 nt, Artificial Sequence
  LRRK2 RNA guide
gaacccagaaguuuagaccagc

SEQ ID NO: 103389 - RNA, 22 nt, Artificial Sequence
  LRRK2 RNA guide
gaagcucauguguuuuuguugc

SEQ ID NO: 103390 - RNA, 22 nt, Artificial Sequence
  LRRK2 RNA guide
gaaguuuagaccagccuaggca

SEQ ID NO: 103391 - RNA, 22 nt, Artificial Sequence
  LRRK2 RNA guide
gaaugaaaaaauuagccuggug

SEQ ID NO: 103392 - RNA, 22 nt, Artificial Sequence
  LRRK2 RNA guide
gacaggguuugcuauuuugccu

SEQ ID NO: 103393 - RNA, 22 nt, Artificial Sequence
  LRRK2 RNA guide
gaccagccuaggcaaaauagca

SEQ ID NO: 103394 - RNA, 22 nt, Artificial Sequence
  LRRK2 RNA guide
gacccugucucuaaaagcaggc

SEQ ID NO: 103395 - RNA, 22 nt, Artificial Sequence
  LRRK2 RNA guide
gagacaggguuugcuauuuugc

SEQ ID NO: 103396 - RNA, 22 nt, Artificial Sequence
  LRRK2 RNA guide
gagagacaggguuugcuauuuu

SEQ ID NO: 103397 - RNA, 22 nt, Artificial Sequence
  LRRK2 RNA guide
gagccaccgugccuggccaugu

SEQ ID NO: 103398 - RNA, 22 nt, Artificial Sequence
  LRRK2 RNA guide
gagcuucacuacagggaauuaa

SEQ ID NO: 103399 - RNA, 22 nt, Artificial Sequence
  LRRK2 RNA guide
gaggaucacuugaacccagaag

SEQ ID NO: 103400 - RNA, 22 nt, Artificial Sequence
  LRRK2 RNA guide
gaggauugcucacuugagccca

SEQ ID NO: 103401 - RNA, 22 nt, Artificial Sequence
  LRRK2 RNA guide
gaggcaggaggauugcucacuu

SEQ ID NO: 103402 - RNA, 22 nt, Artificial Sequence
  LRRK2 RNA guide
gaguugcuagggauacagguac

SEQ ID NO: 103403 - RNA, 22 nt, Artificial Sequence
  LRRK2 RNA guide
gauacagguacaugccaccaca

SEQ ID NO: 103404 - RNA, 22 nt, Artificial Sequence
  LRRK2 RNA guide
gaucacuugaacccagaaguuu

SEQ ID NO: 103405 - RNA, 22 nt, Artificial Sequence
  LRRK2 RNA guide
gauugcucacuugagcccagga

SEQ ID NO: 103406 - RNA, 22 nt, Artificial Sequence
  LRRK2 RNA guide
gcaaaauagcaaacccugucuc

SEQ ID NO: 103407 - RNA, 22 nt, Artificial Sequence
  LRRK2 RNA guide
gcaaacccugucucuccaaaaa

SEQ ID NO: 103408 - RNA, 22 nt, Artificial Sequence
  LRRK2 RNA guide
gcaacaaaaacacaugagcuuc

SEQ ID NO: 103409 - RNA, 22 nt, Artificial Sequence
  LRRK2 RNA guide
gcaagacccugucucuaaaagc

SEQ ID NO: 103410 - RNA, 22 nt, Artificial Sequence
  LRRK2 RNA guide
gcaggaggauugcucacuugag

SEQ ID NO: 103411 - RNA, 22 nt, Artificial Sequence
  LRRK2 RNA guide
gcaggcaacaaaaacacaugag

SEQ ID NO: 103412 - RNA, 22 nt, Artificial Sequence
  LRRK2 RNA guide
gcauguaccuguaucccuagca

SEQ ID NO: 103413 - RNA, 22 nt, Artificial Sequence
  LRRK2 RNA guide
gccaccgugccuggccaugugu

SEQ ID NO: 103414 - RNA, 22 nt, Artificial Sequence
  LRRK2 RNA guide
gccauguguguuuguuucuuuc

SEQ ID NO: 103415 - RNA, 22 nt, Artificial Sequence
  LRRK2 RNA guide
gccuaggcaaaauagcaaaccc

SEQ ID NO: 103416 - RNA, 22 nt, Artificial Sequence
  LRRK2 RNA guide
gccuaggcuggucuaaacuucu

SEQ ID NO: 103417 - RNA, 22 nt, Artificial Sequence
  LRRK2 RNA guide
gccucagccuccugaguugcua

SEQ ID NO: 103418 - RNA, 22 nt, Artificial Sequence
  LRRK2 RNA guide
gccuccugaguugcuagggaua

SEQ ID NO: 103419 - RNA, 22 nt, Artificial Sequence
  LRRK2 RNA guide
gccugcuuuuagagacaggguc

SEQ ID NO: 103420 - RNA, 22 nt, Artificial Sequence
  LRRK2 RNA guide
gccuggccauguguguuuguuu

SEQ ID NO: 103421 - RNA, 22 nt, Artificial Sequence
  LRRK2 RNA guide
gccuggugugguggcauguacc

SEQ ID NO: 103422 - RNA, 22 nt, Artificial Sequence
  LRRK2 RNA guide
gccugguucagguuuguagaaa

SEQ ID NO: 103423 - RNA, 22 nt, Artificial Sequence
  LRRK2 RNA guide
gcuagggauacagguacaugcc

SEQ ID NO: 103424 - RNA, 22 nt, Artificial Sequence
  LRRK2 RNA guide
gcuauuuugccuaggcuggucu

SEQ ID NO: 103425 - RNA, 22 nt, Artificial Sequence
  LRRK2 RNA guide
gcucaagugagcaauccuccug

SEQ ID NO: 103426 - RNA, 22 nt, Artificial Sequence
  LRRK2 RNA guide
gcucauguguuuuuguugccug

SEQ ID NO: 103427 - RNA, 22 nt, Artificial Sequence
  LRRK2 RNA guide
gcugaggcaggaggauugcuca

SEQ ID NO: 103428 - RNA, 22 nt, Artificial Sequence
  LRRK2 RNA guide
gcuggucuaaacuucuggguuc

SEQ ID NO: 103429 - RNA, 22 nt, Artificial Sequence
  LRRK2 RNA guide
gcuucacuacagggaauuaaau

SEQ ID NO: 103430 - RNA, 22 nt, Artificial Sequence
  LRRK2 RNA guide
gcuuuuagagacagggucuugc

SEQ ID NO: 103431 - RNA, 22 nt, Artificial Sequence
  LRRK2 RNA guide
ggagagacaggguuugcuauuu

SEQ ID NO: 103432 - RNA, 22 nt, Artificial Sequence
  LRRK2 RNA guide
ggaggaucacuugaacccagaa

SEQ ID NO: 103433 - RNA, 22 nt, Artificial Sequence
  LRRK2 RNA guide
ggaggauugcucacuugagccc

SEQ ID NO: 103434 - RNA, 22 nt, Artificial Sequence
  LRRK2 RNA guide
ggauacagguacaugccaccac

SEQ ID NO: 103435 - RNA, 22 nt, Artificial Sequence
  LRRK2 RNA guide
ggaucacuugaacccagaaguu

SEQ ID NO: 103436 - RNA, 22 nt, Artificial Sequence
  LRRK2 RNA guide
ggauugcucacuugagcccagg

SEQ ID NO: 103437 - RNA, 22 nt, Artificial Sequence
  LRRK2 RNA guide
ggcaaaauagcaaacccugucu

SEQ ID NO: 103438 - RNA, 22 nt, Artificial Sequence
  LRRK2 RNA guide
ggcaacaaaaacacaugagcuu

SEQ ID NO: 103439 - RNA, 22 nt, Artificial Sequence
  LRRK2 RNA guide
ggcaggaggauugcucacuuga

SEQ ID NO: 103440 - RNA, 22 nt, Artificial Sequence
  LRRK2 RNA guide
ggcauguaccuguaucccuagc

SEQ ID NO: 103441 - RNA, 22 nt, Artificial Sequence
  LRRK2 RNA guide
ggccauguguguuuguuucuuu

SEQ ID NO: 103442 - RNA, 22 nt, Artificial Sequence
  LRRK2 RNA guide
ggcucaagugagcaauccuccu

SEQ ID NO: 103443 - RNA, 22 nt, Artificial Sequence
  LRRK2 RNA guide
ggcugaggcaggaggauugcuc

SEQ ID NO: 103444 - RNA, 22 nt, Artificial Sequence
  LRRK2 RNA guide
ggcuggucuaaacuucuggguu

SEQ ID NO: 103445 - RNA, 22 nt, Artificial Sequence
  LRRK2 RNA guide
ggcuuauaaaaacuaacaggga

SEQ ID NO: 103446 - RNA, 22 nt, Artificial Sequence
  LRRK2 RNA guide
gggauacagguacaugccacca

SEQ ID NO: 103447 - RNA, 22 nt, Artificial Sequence
  LRRK2 RNA guide
gggcucaagugagcaauccucc

SEQ ID NO: 103448 - RNA, 22 nt, Artificial Sequence
  LRRK2 RNA guide
ggguuugcuauuuugccuaggc

SEQ ID NO: 103449 - RNA, 22 nt, Artificial Sequence
  LRRK2 RNA guide
ggucuaaacuucuggguucaag

SEQ ID NO: 103450 - RNA, 22 nt, Artificial Sequence
  LRRK2 RNA guide
gguggcauguaccuguaucccu

SEQ ID NO: 103451 - RNA, 22 nt, Artificial Sequence
  LRRK2 RNA guide
ggugugguggcauguaccugua

SEQ ID NO: 103452 - RNA, 22 nt, Artificial Sequence
  LRRK2 RNA guide
gguucagguuuguagaaagaaa

SEQ ID NO: 103453 - RNA, 22 nt, Artificial Sequence
  LRRK2 RNA guide
gguuucagugagcuaugauugc

SEQ ID NO: 103454 - RNA, 22 nt, Artificial Sequence
  LRRK2 RNA guide
gguuugcuauuuugccuaggcu

SEQ ID NO: 103455 - RNA, 22 nt, Artificial Sequence
  LRRK2 RNA guide
gguuuguagaaagaaacaaaca

SEQ ID NO: 103456 - RNA, 22 nt, Artificial Sequence
  LRRK2 RNA guide
guaccuguaucccuagcaacuc

SEQ ID NO: 103457 - RNA, 22 nt, Artificial Sequence
  LRRK2 RNA guide
guagaaagaaacaaacacacau

SEQ ID NO: 103458 - RNA, 22 nt, Artificial Sequence
  LRRK2 RNA guide
guagugaagcucauguguuuuu

SEQ ID NO: 103459 - RNA, 22 nt, Artificial Sequence
  LRRK2 RNA guide
guaucccuagcaacucaggagg

SEQ ID NO: 103460 - RNA, 22 nt, Artificial Sequence
  LRRK2 RNA guide
guauuuaauucccuguagugaa

SEQ ID NO: 103461 - RNA, 22 nt, Artificial Sequence
  LRRK2 RNA guide
gucuaaacuucuggguucaagu

SEQ ID NO: 103462 - RNA, 22 nt, Artificial Sequence
  LRRK2 RNA guide
gucucuaaaagcaggcaacaaa

SEQ ID NO: 103463 - RNA, 22 nt, Artificial Sequence
  LRRK2 RNA guide
gugaagcucauguguuuuuguu

SEQ ID NO: 103464 - RNA, 22 nt, Artificial Sequence
  LRRK2 RNA guide
gugagcaauccuccugccucag

SEQ ID NO: 103465 - RNA, 22 nt, Artificial Sequence
  LRRK2 RNA guide
gugagccaccgugccuggccau

SEQ ID NO: 103466 - RNA, 22 nt, Artificial Sequence
  LRRK2 RNA guide
gugccuggccauguguguuugu

SEQ ID NO: 103467 - RNA, 22 nt, Artificial Sequence
  LRRK2 RNA guide
guggcauguaccuguaucccua

SEQ ID NO: 103468 - RNA, 22 nt, Artificial Sequence
  LRRK2 RNA guide
gugguggcauguaccuguaucc

SEQ ID NO: 103469 - RNA, 22 nt, Artificial Sequence
  LRRK2 RNA guide
gugugguggcauguaccuguau

SEQ ID NO: 103470 - RNA, 22 nt, Artificial Sequence
  LRRK2 RNA guide
guguguuuguuucuuucuacaa

SEQ ID NO: 103471 - RNA, 22 nt, Artificial Sequence
  LRRK2 RNA guide
guguuuguuucuuucuacaaac

SEQ ID NO: 103472 - RNA, 22 nt, Artificial Sequence
  LRRK2 RNA guide
guguuuuuguugccugcuuuua

SEQ ID NO: 103473 - RNA, 22 nt, Artificial Sequence
  LRRK2 RNA guide
guuaguuuuuauaagccugguu

SEQ ID NO: 103474 - RNA, 22 nt, Artificial Sequence
  LRRK2 RNA guide
guucagguuuguagaaagaaac

SEQ ID NO: 103475 - RNA, 22 nt, Artificial Sequence
  LRRK2 RNA guide
guugccugcuuuuagagacagg

SEQ ID NO: 103476 - RNA, 22 nt, Artificial Sequence
  LRRK2 RNA guide
guugcuagggauacagguacau

SEQ ID NO: 103477 - RNA, 22 nt, Artificial Sequence
  LRRK2 RNA guide
guuuagaccagccuaggcaaaa

SEQ ID NO: 103478 - RNA, 22 nt, Artificial Sequence
  LRRK2 RNA guide
guuucagugagcuaugauugca

SEQ ID NO: 103479 - RNA, 22 nt, Artificial Sequence
  LRRK2 RNA guide
guuucuuucuacaaaccugaac

SEQ ID NO: 103480 - RNA, 22 nt, Artificial Sequence
  LRRK2 RNA guide
guuugcuauuuugccuaggcug

SEQ ID NO: 103481 - RNA, 22 nt, Artificial Sequence
  LRRK2 RNA guide
guuuguagaaagaaacaaacac

SEQ ID NO: 103482 - RNA, 22 nt, Artificial Sequence
  LRRK2 RNA guide
guuuguuucuuucuacaaaccu

SEQ ID NO: 103483 - RNA, 22 nt, Artificial Sequence
  LRRK2 RNA guide
guuuuuauaagccugguucagg

SEQ ID NO: 103484 - RNA, 22 nt, Artificial Sequence
  LRRK2 RNA guide
guuuuuguugccugcuuuuaga

SEQ ID NO: 103485 - RNA, 22 nt, Artificial Sequence
  LRRK2 RNA guide
uaaaagcaggcaacaaaaacac

SEQ ID NO: 103486 - RNA, 22 nt, Artificial Sequence
  LRRK2 RNA guide
uaaacuucuggguucaagugau

SEQ ID NO: 103487 - RNA, 22 nt, Artificial Sequence
  LRRK2 RNA guide
uaagccugguucagguuuguag

SEQ ID NO: 103488 - RNA, 22 nt, Artificial Sequence
  LRRK2 RNA guide
uaauucccuguagugaagcuca

SEQ ID NO: 103489 - RNA, 22 nt, Artificial Sequence
  LRRK2 RNA guide
uacaaaccugaaccaggcuuau

SEQ ID NO: 103490 - RNA, 22 nt, Artificial Sequence
  LRRK2 RNA guide
uaccuguaucccuagcaacuca

SEQ ID NO: 103491 - RNA, 22 nt, Artificial Sequence
  LRRK2 RNA guide
uagaaagaaacaaacacacaug

SEQ ID NO: 103492 - RNA, 22 nt, Artificial Sequence
  LRRK2 RNA guide
uagaccagccuaggcaaaauag

SEQ ID NO: 103493 - RNA, 22 nt, Artificial Sequence
  LRRK2 RNA guide
uagcaaacccugucucuccaaa

SEQ ID NO: 103494 - RNA, 22 nt, Artificial Sequence
  LRRK2 RNA guide
uaggcaaaauagcaaacccugu

SEQ ID NO: 103495 - RNA, 22 nt, Artificial Sequence
  LRRK2 RNA guide
uaggcuggucuaaacuucuggg

SEQ ID NO: 103496 - RNA, 22 nt, Artificial Sequence
  LRRK2 RNA guide
uagggauacagguacaugccac

SEQ ID NO: 103497 - RNA, 22 nt, Artificial Sequence
  LRRK2 RNA guide
uagugaagcucauguguuuuug

SEQ ID NO: 103498 - RNA, 22 nt, Artificial Sequence
  LRRK2 RNA guide
uaguuuuuauaagccugguuca

SEQ ID NO: 103499 - RNA, 22 nt, Artificial Sequence
  LRRK2 RNA guide
uauaagccugguucagguuugu

SEQ ID NO: 103500 - RNA, 22 nt, Artificial Sequence
  LRRK2 RNA guide
uaucccuagcaacucaggaggc

SEQ ID NO: 103501 - RNA, 22 nt, Artificial Sequence
  LRRK2 RNA guide
uauuuaauucccuguagugaag

SEQ ID NO: 103502 - RNA, 22 nt, Artificial Sequence
  LRRK2 RNA guide
uauuuugccuaggcuggucuaa

SEQ ID NO: 103503 - RNA, 22 nt, Artificial Sequence
  LRRK2 RNA guide
ucaagugagcaauccuccugcc

SEQ ID NO: 103504 - RNA, 22 nt, Artificial Sequence
  LRRK2 RNA guide
ucacuacagggaauuaaauaca

SEQ ID NO: 103505 - RNA, 22 nt, Artificial Sequence
  LRRK2 RNA guide
ucacuugaacccagaaguuuag

SEQ ID NO: 103506 - RNA, 22 nt, Artificial Sequence
  LRRK2 RNA guide
ucagccuccugaguugcuaggg

SEQ ID NO: 103507 - RNA, 22 nt, Artificial Sequence
  LRRK2 RNA guide
ucagguuuguagaaagaaacaa

SEQ ID NO: 103508 - RNA, 22 nt, Artificial Sequence
  LRRK2 RNA guide
ucauguguuuuuguugccugcu

SEQ ID NO: 103509 - RNA, 22 nt, Artificial Sequence
  LRRK2 RNA guide
ucauucuuuuuuggagagacag

SEQ ID NO: 103510 - RNA, 22 nt, Artificial Sequence
  LRRK2 RNA guide
ucccuagcaacucaggaggcug

SEQ ID NO: 103511 - RNA, 22 nt, Artificial Sequence
  LRRK2 RNA guide
ucccuguagugaagcucaugug

SEQ ID NO: 103512 - RNA, 22 nt, Artificial Sequence
  LRRK2 RNA guide
ucccuguuaguuuuuauaagcc

SEQ ID NO: 103513 - RNA, 22 nt, Artificial Sequence
  LRRK2 RNA guide
uccugaguugcuagggauacag

SEQ ID NO: 103514 - RNA, 22 nt, Artificial Sequence
  LRRK2 RNA guide
uccugggcucaagugagcaauc

SEQ ID NO: 103515 - RNA, 22 nt, Artificial Sequence
  LRRK2 RNA guide
ucuaaaagcaggcaacaaaaac

SEQ ID NO: 103516 - RNA, 22 nt, Artificial Sequence
  LRRK2 RNA guide
ucuaaacuucuggguucaagug

SEQ ID NO: 103517 - RNA, 22 nt, Artificial Sequence
  LRRK2 RNA guide
ucuacaaaccugaaccaggcuu

SEQ ID NO: 103518 - RNA, 22 nt, Artificial Sequence
  LRRK2 RNA guide
ucucauuguauuuaauucccug

SEQ ID NO: 103519 - RNA, 22 nt, Artificial Sequence
  LRRK2 RNA guide
ucucuaaaagcaggcaacaaaa

SEQ ID NO: 103520 - RNA, 22 nt, Artificial Sequence
  LRRK2 RNA guide
ucuuucuacaaaccugaaccag

SEQ ID NO: 103521 - RNA, 22 nt, Artificial Sequence
  LRRK2 RNA guide
ucuuuuuuggagagacaggguu

SEQ ID NO: 103522 - RNA, 22 nt, Artificial Sequence
  LRRK2 RNA guide
ugaaccaggcuuauaaaaacua

SEQ ID NO: 103523 - RNA, 22 nt, Artificial Sequence
  LRRK2 RNA guide
ugaacccagaaguuuagaccag

SEQ ID NO: 103524 - RNA, 22 nt, Artificial Sequence
  LRRK2 RNA guide
ugaagcucauguguuuuuguug

SEQ ID NO: 103525 - RNA, 22 nt, Artificial Sequence
  LRRK2 RNA guide
ugagccaccgugccuggccaug

SEQ ID NO: 103526 - RNA, 22 nt, Artificial Sequence
  LRRK2 RNA guide
ugagcuucacuacagggaauua

SEQ ID NO: 103527 - RNA, 22 nt, Artificial Sequence
  LRRK2 RNA guide
ugaggcaggaggauugcucacu

SEQ ID NO: 103528 - RNA, 22 nt, Artificial Sequence
  LRRK2 RNA guide
ugaguugcuagggauacaggua

SEQ ID NO: 103529 - RNA, 22 nt, Artificial Sequence
  LRRK2 RNA guide
ugccuaggcuggucuaaacuuc

SEQ ID NO: 103530 - RNA, 22 nt, Artificial Sequence
  LRRK2 RNA guide
ugccucagccuccugaguugcu

SEQ ID NO: 103531 - RNA, 22 nt, Artificial Sequence
  LRRK2 RNA guide
ugccugcuuuuagagacagggu

SEQ ID NO: 103532 - RNA, 22 nt, Artificial Sequence
  LRRK2 RNA guide
ugccuggccauguguguuuguu

SEQ ID NO: 103533 - RNA, 22 nt, Artificial Sequence
  LRRK2 RNA guide
ugcuagggauacagguacaugc

SEQ ID NO: 103534 - RNA, 22 nt, Artificial Sequence
  LRRK2 RNA guide
ugcuauuuugccuaggcugguc

SEQ ID NO: 103535 - RNA, 22 nt, Artificial Sequence
  LRRK2 RNA guide
ugcuuuuagagacagggucuug

SEQ ID NO: 103536 - RNA, 22 nt, Artificial Sequence
  LRRK2 RNA guide
uggagagacaggguuugcuauu

SEQ ID NO: 103537 - RNA, 22 nt, Artificial Sequence
  LRRK2 RNA guide
uggcauguaccuguaucccuag

SEQ ID NO: 103538 - RNA, 22 nt, Artificial Sequence
  LRRK2 RNA guide
uggccauguguguuuguuucuu

SEQ ID NO: 103539 - RNA, 22 nt, Artificial Sequence
  LRRK2 RNA guide
ugggcucaagugagcaauccuc

SEQ ID NO: 103540 - RNA, 22 nt, Artificial Sequence
  LRRK2 RNA guide
uggucuaaacuucuggguucaa

SEQ ID NO: 103541 - RNA, 22 nt, Artificial Sequence
  LRRK2 RNA guide
ugguggcauguaccuguauccc

SEQ ID NO: 103542 - RNA, 22 nt, Artificial Sequence
  LRRK2 RNA guide
uggugugguggcauguaccugu

SEQ ID NO: 103543 - RNA, 22 nt, Artificial Sequence
  LRRK2 RNA guide
ugguucagguuuguagaaagaa

SEQ ID NO: 103544 - RNA, 22 nt, Artificial Sequence
  LRRK2 RNA guide
uguaccuguaucccuagcaacu

SEQ ID NO: 103545 - RNA, 22 nt, Artificial Sequence
  LRRK2 RNA guide
uguagaaagaaacaaacacaca

SEQ ID NO: 103546 - RNA, 22 nt, Artificial Sequence
  LRRK2 RNA guide
uguagugaagcucauguguuuu

SEQ ID NO: 103547 - RNA, 22 nt, Artificial Sequence
  LRRK2 RNA guide
uguaucccuagcaacucaggag

SEQ ID NO: 103548 - RNA, 22 nt, Artificial Sequence
  LRRK2 RNA guide
uguauuuaauucccuguaguga

SEQ ID NO: 103549 - RNA, 22 nt, Artificial Sequence
  LRRK2 RNA guide
ugucucuaaaagcaggcaacaa

SEQ ID NO: 103550 - RNA, 22 nt, Artificial Sequence
  LRRK2 RNA guide
ugugagccaccgugccuggcca

SEQ ID NO: 103551 - RNA, 22 nt, Artificial Sequence
  LRRK2 RNA guide
ugugguggcauguaccuguauc

SEQ ID NO: 103552 - RNA, 22 nt, Artificial Sequence
  LRRK2 RNA guide
uguguguuuguuucuuucuaca

SEQ ID NO: 103553 - RNA, 22 nt, Artificial Sequence
  LRRK2 RNA guide
uguguuuguuucuuucuacaaa

SEQ ID NO: 103554 - RNA, 22 nt, Artificial Sequence
  LRRK2 RNA guide
uguguuuuuguugccugcuuuu

SEQ ID NO: 103555 - RNA, 22 nt, Artificial Sequence
  LRRK2 RNA guide
uguuaguuuuuauaagccuggu

SEQ ID NO: 103556 - RNA, 22 nt, Artificial Sequence
  LRRK2 RNA guide
uguugccugcuuuuagagacag

SEQ ID NO: 103557 - RNA, 22 nt, Artificial Sequence
  LRRK2 RNA guide
uguuucuuucuacaaaccugaa

SEQ ID NO: 103558 - RNA, 22 nt, Artificial Sequence
  LRRK2 RNA guide
uguuuguuucuuucuacaaacc

SEQ ID NO: 103559 - RNA, 22 nt, Artificial Sequence
  LRRK2 RNA guide
uguuuuuguugccugcuuuuag

SEQ ID NO: 103560 - RNA, 22 nt, Artificial Sequence
  LRRK2 RNA guide
uuaauucccuguagugaagcuc

SEQ ID NO: 103561 - RNA, 22 nt, Artificial Sequence
  LRRK2 RNA guide
uuagaccagccuaggcaaaaua

SEQ ID NO: 103562 - RNA, 22 nt, Artificial Sequence
  LRRK2 RNA guide
uuaguuuuuauaagccugguuc

SEQ ID NO: 103563 - RNA, 22 nt, Artificial Sequence
  LRRK2 RNA guide
uuauaagccugguucagguuug

SEQ ID NO: 103564 - RNA, 22 nt, Artificial Sequence
  LRRK2 RNA guide
uucagguuuguagaaagaaaca

SEQ ID NO: 103565 - RNA, 22 nt, Artificial Sequence
  LRRK2 RNA guide
uucauucuuuuuuggagagaca

SEQ ID NO: 103566 - RNA, 22 nt, Artificial Sequence
  LRRK2 RNA guide
uucccuguagugaagcucaugu

SEQ ID NO: 103567 - RNA, 22 nt, Artificial Sequence
  LRRK2 RNA guide
uucccuguuaguuuuuauaagc

SEQ ID NO: 103568 - RNA, 22 nt, Artificial Sequence
  LRRK2 RNA guide
uucuacaaaccugaaccaggcu

SEQ ID NO: 103569 - RNA, 22 nt, Artificial Sequence
  LRRK2 RNA guide
uucuuucuacaaaccugaacca

SEQ ID NO: 103570 - RNA, 22 nt, Artificial Sequence
  LRRK2 RNA guide
uucuuuuuuggagagacagggu

SEQ ID NO: 103571 - RNA, 22 nt, Artificial Sequence
  LRRK2 RNA guide
uugaacccagaaguuuagacca

SEQ ID NO: 103572 - RNA, 22 nt, Artificial Sequence
  LRRK2 RNA guide
uugccuaggcuggucuaaacuu

SEQ ID NO: 103573 - RNA, 22 nt, Artificial Sequence
  LRRK2 RNA guide
uugccugcuuuuagagacaggg

SEQ ID NO: 103574 - RNA, 22 nt, Artificial Sequence
  LRRK2 RNA guide
uugcuagggauacagguacaug

SEQ ID NO: 103575 - RNA, 22 nt, Artificial Sequence
  LRRK2 RNA guide
uugcuauuuugccuaggcuggu

SEQ ID NO: 103576 - RNA, 22 nt, Artificial Sequence
  LRRK2 RNA guide
uugcucacuugagcccaggagu

SEQ ID NO: 103577 - RNA, 22 nt, Artificial Sequence
  LRRK2 RNA guide
uuggagagacaggguuugcuau

SEQ ID NO: 103578 - RNA, 22 nt, Artificial Sequence
  LRRK2 RNA guide
uuguagaaagaaacaaacacac

SEQ ID NO: 103579 - RNA, 22 nt, Artificial Sequence
  LRRK2 RNA guide
uuguauuuaauucccuguagug

SEQ ID NO: 103580 - RNA, 22 nt, Artificial Sequence
  LRRK2 RNA guide
uuguugccugcuuuuagagaca

SEQ ID NO: 103581 - RNA, 22 nt, Artificial Sequence
  LRRK2 RNA guide
uuguuucuuucuacaaaccuga

SEQ ID NO: 103582 - RNA, 22 nt, Artificial Sequence
  LRRK2 RNA guide
uuuaauucccuguagugaagcu

SEQ ID NO: 103583 - RNA, 22 nt, Artificial Sequence
  LRRK2 RNA guide
uuuagaccagccuaggcaaaau

SEQ ID NO: 103584 - RNA, 22 nt, Artificial Sequence
  LRRK2 RNA guide
uuuauaagccugguucagguuu

SEQ ID NO: 103585 - RNA, 22 nt, Artificial Sequence
  LRRK2 RNA guide
uuucagugagcuaugauugcac

SEQ ID NO: 103586 - RNA, 22 nt, Artificial Sequence
  LRRK2 RNA guide
uuucauucuuuuuuggagagac

SEQ ID NO: 103587 - RNA, 22 nt, Artificial Sequence
  LRRK2 RNA guide
uuucuacaaaccugaaccaggc

SEQ ID NO: 103588 - RNA, 22 nt, Artificial Sequence
  LRRK2 RNA guide
uuucuuucuacaaaccugaacc

SEQ ID NO: 103589 - RNA, 22 nt, Artificial Sequence
  LRRK2 RNA guide
uuugccuaggcuggucuaaacu

SEQ ID NO: 103590 - RNA, 22 nt, Artificial Sequence
  LRRK2 RNA guide
uuugcuauuuugccuaggcugg

SEQ ID NO: 103591 - RNA, 22 nt, Artificial Sequence
  LRRK2 RNA guide
uuuggagagacaggguuugcua

SEQ ID NO: 103592 - RNA, 22 nt, Artificial Sequence
  LRRK2 RNA guide
uuuguagaaagaaacaaacaca

SEQ ID NO: 103593 - RNA, 22 nt, Artificial Sequence
  LRRK2 RNA guide
uuuguugccugcuuuuagagac

SEQ ID NO: 103594 - RNA, 22 nt, Artificial Sequence
  LRRK2 RNA guide
uuuguuucuuucuacaaaccug

SEQ ID NO: 103595 - RNA, 22 nt, Artificial Sequence
  LRRK2 RNA guide
uuuuauaagccugguucagguu

SEQ ID NO: 103596 - RNA, 22 nt, Artificial Sequence
  LRRK2 RNA guide
uuuucauucuuuuuuggagaga

SEQ ID NO: 103597 - RNA, 22 nt, Artificial Sequence
  LRRK2 RNA guide
uuuugccuaggcuggucuaaac

SEQ ID NO: 103598 - RNA, 22 nt, Artificial Sequence
  LRRK2 RNA guide
uuuuggagagacaggguuugcu

SEQ ID NO: 103599 - RNA, 22 nt, Artificial Sequence
  LRRK2 RNA guide
uuuuguugccugcuuuuagaga

SEQ ID NO: 103600 - RNA, 22 nt, Artificial Sequence
  LRRK2 RNA guide
uuuuuauaagccugguucaggu

SEQ ID NO: 103601 - RNA, 22 nt, Artificial Sequence
  LRRK2 RNA guide
uuuuucauucuuuuuuggagag

SEQ ID NO: 103602 - RNA, 22 nt, Artificial Sequence
  LRRK2 RNA guide
uuuuuggagagacaggguuugc

SEQ ID NO: 103603 - RNA, 22 nt, Artificial Sequence
  LRRK2 RNA guide
uuuuuguugccugcuuuuagag

SEQ ID NO: 103604 - RNA, 22 nt, Artificial Sequence
  LRRK2 RNA guide
uuuuuuggagagacaggguuug

SEQ ID NO: 103605 - RNA, 22 nt, Artificial Sequence
  LRRK2 RNA guide
aaacacuguuuaauuaauuuuu

SEQ ID NO: 103606 - RNA, 22 nt, Artificial Sequence
  LRRK2 RNA guide
uguuuaauuaauuuuucaacca

SEQ ID NO: 103607 - RNA, 20 nt, Artificial Sequence
  Example nucleotide guide sequence
aaaaaaauguacuugguucc

SEQ ID NO: 103608 - RNA, 17 nt, Artificial Sequence
  17 nucleotide guide sequence 1
aaaauguacuugguucc

SEQ ID NO: 103609 - RNA, 17 nt, Artificial Sequence
  17 nucleotide guide sequence 2
aaaaauguacuugguuc

SEQ ID NO: 103610 - RNA, 17 nt, Artificial Sequence
  103610 - 17 nucleotide guide sequence 3
aaaaaauguacuugguu

SEQ ID NO: 103611 - RNA, 17 nt, Artificial Sequence
  17 nucleotide guide sequence 4
aaaaaaauguacuuggu

SEQ ID NO: 103612 - protein, 1091 aa, Unknown
  OMNI-159 CRISPR Nuclease
MNYIIGLDIGITSVGYAVLMLNDNDIPCRILKMGSRIFEIAENPKDGSSLAAPRRINRGMRRRLRRRRFRKEQIRNLIIQNNIMTNDEIISIYNSGKELTDIYKIRCEALDRELDKEEFVRLLIHLSQRRGFKSNRKVDASDSKSEAGKLLNAVKTNKTLMEEKGYRTIGEMLYKDECFADVKRNKADDYSNTFARSEFEAEINAFFDAQQKFGNEYANDEMRDSYLKIYLSQRAFDEGPGGNSPYGGNQIEKMLGKCTFEPDEFRSVKAAYSFEYFNLLTKVNSLKLITPEEKRFLTKEEKDKIINLAFSKKTISYASIRKELGILADTYFNISYGKGDITPEETEKKTKFTYLNAFHVFRKAYGDVFLNWSKDKKNSLGYALTVYKNDSKIVDYLNNKGFDKAEIDIALTLPSFSKTGNLSIKALDKLIPFLEQGMLYNEACAAAGYNFKNDDTSKRKFLPANEEDAPELGDIRNPVVRRSVSQTIKVINAIIRKYGESPTLVNIELARELSKAKKDRDKIEKNQKDNRSRNEAIVEELKNTFHILQPTGQDVVKYKLWKEQDGICPYSLKSISLDKLFDVGYTDIDHIIPYSVSFDDTYNNKVLVLSSENRQKGNRLPMEYLKGKKRDEFWLWVDNSNLRSRKKKNLLKEQITEEDISGFKKRNLQDTQYISRFLLSYLKKYLELQPNGSAIKNTIKAVNGAATAYVRKRWGINKIRENGDIHHAVDAVVIGCITNPMIKKISEYSKYRELEFVNPHTDEILDIDTRTGELVNRFPMPYDWFRDEFIMRTSSDPTRVLHEKPLPNYATDEEVSPIFVSRMPKRKVSGAAHKDTIRRKYVNEVGLEYTVSKVPLSSLRLKNGEIEGYFNPSSDMLLYNALKSRLAMYDGDGKKAFADSTEPFRKPKHDGTDGPIVKKVKIQNKATLSVQVQNKTAIADNGSMVRVDVFFVENEGYYLVPVYVSDTVALDLPNRAIVGGKPYSKWKEMDNDNFVFSLYPNDLIKVKSKRDMKFNLVNPDSTLAKNYTARESMLYYKGTDISTAAITAINHDNTYKLRGLGVKSLLSIEKYSVDVLGNKTKVNKEKRMGFV

SEQ ID NO: 103613 - protein, 1062 aa, Unknown
  OMNI-79 CRISPR Nuclease
MEKRLGLDIGTNSLGWCLYEGDSILDIGVRIFSDGRDPKSGASLAVDRRNARAMRRRRDRYLGRRSALIKALKAHGLFPAEQDAAKALEREDPYSLRVRALDHRLDPHQIGRAIFHLNQRRGFRSNRKADRVLGDQESGLISTATRVLDEAMAKSGARTLGEFLASRDTRRVRMRPDVKGYDFYPNRQHYLEEFEKIWDAQSQYHPDLLSQQAKSAIHRIIFHQRPLKPQAVGTCTFAGLHGIPGDETRLPKAHPLFQQRRLYEEVNQLEIVCASAPARKLTRDERDALILKLQDKKKVTFSTLARTIRLKEGERFNKESENRKDLAGDEVRAEMSDKTRFGRRWFHLSLDEQWSVIDRLLNEESTEDLLAWLEKEWSLPSDVAEAVANAHLPDGHGRFGLTATVRLLEHLKADVVTYAEAARRAGFHHSDFRDGACYDELPYYGEILSREIAPGKDEYGDPLERQWGKITNPTVHIGLNQLRRLINALVRRHGRPDFIFVELARELKLNEKQKADHKRRIKQTTDAARARAEKLREIGQRDSGSNRMLLRIWEELNPSNPLDRRCPYCAEPISIEMLMSGSADIDHIVPYSRCLDDSAANKVVAHNHCNRQKGNRTPWEQWGQTTRWPLIQEQVARMHRSKQWRFGPDAMERVDRDGGFIARQLTDTQYLSRIAAQYLSALYTPDEGRRVYAVTGRLTAMLRRLWGLNDILPDHNWVLNPHSNAPKNRLDHRHHAIDAAVVGATTPAMIQQVARAAARAEEQDLDRLFADLPPPWPGFREELQGRIMAAVVSHKPDHGRKGRPLPGRDSTSGRLHNDTAYGFTGRRNAKGMPIVVTRKPLLALKPEDLTDPERIPDPALQGALFEATRGATGKDFEKALRDFSRRDGPYQGIRRIRLTEALNVIPIRDRTGHAYKGVKGDANARFDVWRLPDGKWITRWKDRDGIEHSGIVSLFDAHQPSQVYHRPHPAAKKVLSLRQNDLVAVEHDGDPGKIMRVVKFSANGRITFAPHNEAGPLKTRDTDPADPFRYVTTVASGLKKMRARQVRIDELGKVHDPGPRED
